United States Patent Application Publication US 2021/0283234 A1 - sequence listing, part 5

SEQ ID NO: 3 - DNA, 4870265 bp, Artificial Sequence (residues 1,623,423-3,246,844 of 4,870,265)
  NCBI Ref Sequence NC_016855.1; Salmonella enterica subsp. enterica serovar Typhimurium str. 14028S, complete geneome
tcgtgaacgtgtagcgtagcctgcatcatattacggatacagtttgcgttgtccggaatcgcgattcccagcgcattttctacggcacggattgaggtcagagcgtgtgtaccggtgcagacgccgcaaatgcgttcaacgaatgcccaggcgtctcgcggatcgcgacctttcaggataacctccaggccgcgccacatggtgccggtcgacacggcgttagtaatgacattattactgtcgatattcacttcgcagcgcatatgcccttcgatgcgagtaaccggatcgaccacaattcgccgtccgctattgtccagcgtaaaaccctgagtctgataaggatatgccataattattttttctcttccggagcgttttctgatgacgtgttgtttttattgcgggcatgttttatggcgctcaccgtggcgtgagcgatggcggcagcgcccgcgacgccagcaacgcccagtccgattttatcggcggtagcctcaatgccggtttgcggaatgcccgttgcccggctgtaaaaagaaccgtaatcccagaatccatcttccgaacatccgaggcatccatgacccgactggataggaaaagacacgccatcattccagcgaacggttgaacaggcgttataggtggtcgggcctttacagcccatcttgtacaggcaatacccttttctggcgccttcgtcatcccacgcttccacaaactgaccggcatcgaaatgcgcgcgtcggtaacatttgtcatgaattcgctggccataaaacatttttggtcgtccaagacgatcaaggggagggatgcgatcaaatgccagcatataggtgataacggcggacatcacttcaggtataggcgggcagcctggcactttaataatgggtttatcggtaattaacttgtgaaccggcgtggctttagttgggttgggacgggctgcctgcacgcagccccatgatgcgcaggacccccaggcgataatcgctttagcatccgcgctgacgcgttttaacttctccaggaacggctcgccagccagtatgcaaaacatcccatcttcattcagcggcgcgttaccttccacagcaacgatataatttcctttgtactcacgcatcacatccgccaacgcctgctcagcttgttgccctgcggcggccataatggtgtcgtcataatccagggaaatgagcgacaaaatggcatcttttgccaacgggtgcgcagagcgaatgaaagattcggtacagcaggtacattcaagaccatgcagccatatcactggcgtacgcggtttattctccagggcataagctatttgaggaatcatcgaactgctcaggcctaaagacgttgcggtaaggctgcaaaacttgaggaagctacgccttgtcacgccgtgtctacgcataacttgataaaatgtatcttgtgtttgcataacgtttatcccaaaccactatagttagtgtgggcatcatatgttgcatttcttgtctttctcaacgtgttttagtagcaattatgtttctaattcgtaacaactgattacatgtgtgctactcacattactcaaaaacataaattaatttaatgttattggtgatgttgagtaaatatagcgttgtgatggcatctcttaatgttgataagaaaccgtgttttttatttataacatgatgggatttttttaaatggtcacacggataacgcgttttcatgttagctcgctctgtttaactctcctttaaacccgtcagttaaatttattagcttgtaaaataagatcacaattaattacgtgctgcataaccattgataggtttaatttaatatattcatccaatccattttacaaacaaggagagcatgatgaaaaaaagtaaagcaatgttatttatcgctccggcgctgttttcatacgccctggcggcacaggcctgcacgacccttgctattcaggataaacaaggcgatatttttcatgggcgtacgctggaatatatgcaggatttaccctcatggttaacgtattacccggcgggaacacagtttgataaaaaaacgccggatggcagccaggggataagctatcaggcgaagtatccgatactggccattacttccaccattactgatggcgatagcagagacatacttgaaggcatgaatagcgcgggattgtcatttagtgaaaacatgatcatgaatgcgcagttgccgccattgcccgcgagtgaatataaacaggcaattcctgtcacctcgttgggagaatgggcgctggcccgttttgctactgtcggcgaggtaaaacaggcaataaaagagggcaaattctggtcaccagaactgcatcggtttggcgatctgaaatcgccatttcattacgcgttttacgacaagaaaggaggaagcattgtcgttgaagtggaaaatggtaaattccatgtctatgacaatcccactcgcgtgatgacaaatggtcccgcattcccctggcatctgacaaatctgaataattatacgcaattaaccaatgtggaccgctcttcaggcacactgggcgggataaaagtgatgcagcctgatagcgggattgctattgcagacttgccatcgtccgatacgtcggtttcccgttttatacgcggcgtttattacaccacatatgcgccgcaagcgacatccgcccacgatgcaatgaatacgcttgcgcatattatgagccgtttcgatcgtccgaaaaatattacggttgattatatggggagtgaaggggaaggcaacgccacccgcaaaccggtctcagaatatacggtctggacaacgctgtctgacttaatgcacggtgagatgatggtgcgcggctacaatgatatcaactataaaacctggtctctttctcagtttaagaacgcgacagcgcccgtgttcgagaaaatcaacgtcaaaggataaatagctcatctcggtttagtttccccggtagtctcggcgaaggtaatggagactaccggcggttgcttctctttatcatgcacggtaattaattatcacgatcaccagcgccaggatggtatgctaaatccattcaaaatcccctggatatggattggagggcgcatggttatacctgaggtcaggcaggagaggctctatcagaagatagccaacctcatcattaagctgatcaatgataatatttttccaccgggaacttttttaccgccagaacgcgaactggcaaaacagcttggcgtgagccgcgcctccttgcgagaagcccttattgtactggagatctcgggatggatcgtgattcagtccggtaatggggttatcgtttcagataaaaaacaccttgccagcgactataccatcgaagaaattctctctactcgcgagctggtcgatagccattgtgcgcgcttagccgcacaaaacgataacgttgacgtcatcaaccaaatagaggcgatttatcatcgtatggatcaagccattaacgataataacgtccacggcttttactcgctggataaagagtttcaccttgcgatctctgaggccagccgtaaccgggtgttgttcgatatgtcccgtatgttatgggaacaacggattaatatcccttatgctgggctcgacgagcagtctggagacagaaatgttttacttaatctcaacaaacaacataaagcgatagtggatgcgatgcgacagtctgatgctgacagcgcctatgagggatcgctggaacatttacgctatgtgagaaagattgtcggcggctaattttgtcgatgaataacaccgcatggcggtcatgccatgcggtggagcttgccgtaaatcaatggaaaacagcattaatctttaagtagcgctccggatagcgatcaagttctttaactgcatcagggatctcatcaagattgacgaccttactgacgacatcttgcggattaatctccagcgtagacagcatacgtaatgcctcatcaaattcaccggcactggtgcgggaaccgcgtaaatccagttctttataggtgatcaggttcgtcggcagcgacgtttcctgttttggccatccggtaaacgaaatacgaccagcaaacgatgctaaatcaagcgtatttcgaatagcgctatttgcgccggaagcttctatcacgacctgcgccatggtgccgtgggtgatatttttaatagcgtcgataacctgatcgtcagcggcgttcagcacataaggaacgccaagcttttgcgcatagcgtagcctttcttccacaatatcgatcagaataggcgttgccttgtaatgacgcgcgcttaatgccgccataagaccaatggcccccgcgccgatgatggcaacatattccccggccttaacgtttgcccgatgcaacgcgtgcagagcgatggtcagcggttctgccagcggcgccatttcagaaggcacattatctggtattttatgaattaaatgtgcgggatgagtaaccacctcctgcattgcgccatcgacatgcacgccaatgacgtttaaattttcacaacaattagttctgccgacagagcaagggtagcagtgaccacaataaatataggggtcaacaattacgcggtcaccttctttaatattgtccggcattccggcgccttcctgaagaacaattccggtcacttcatgcccaataattcttgggtaagtaaccagtgggttcgttccacgaaaagccccgatatccgatccgcaaatgcctgcagcatcaaccttaattaatacttcattttctttcttatggggataatccacccagcgggtttcaacttcaccaggcttattaatgaacacagctttgactttcattggctttgaatcctttactttttacaaacacgaagaccaacaggcttgaaacgatagcgatagcaccagccagatagaacgcatagtcatatttaccgctaaattgaacgataaaaccggtgacaagcggaccgataatgccggatatattagccaggccatgcatggctccgccgacgctccctaccttatctttatgaacaacatcctgaataaccgcccaataaattgggcccgttaaatagagcaggaagagtgaaactgacatgagcgtaattgcgctaccaatagtgctaacagtaccggaaacggcaacacataccgctgcgcctgccagacatacgcccagaataagtcgacgtgagagcagagcattaccggtaatccgataaattacatcggaacagacgccgccgagtaccataccaatggcgccgatgacccagggaattaccgtggcgatactaatttctttaatatcgagatgtaacgaatggttcaggtaacttgggaaccaggtcaggaagaaaaaaagaatatagttgtagctgaaaaaagccagagttgtcgcccataccattggttgtttcatgtaatagccgagtgaaggcgtagcccggccatcatcagataaaataacgtcctcatgattttcaaaatcaatgcgttcttccggcgccaggcgtttactcattgttggcttatcgctaacgataaagtaccacagtagtacccagaccaggccaaataagaaaataatgccaaatgcggggcgccagcctaaggataacgccaacaggcccacaatcggcccggacaccgcgccgccgagcggggaaccggcgctaaaaattccgatcgccgtggcagactcctttcgggaaatccagttattgatgattttatttccggcagcgctgaccggcccttcagccataccgaaaagaacgcgcacgataagcattgtccacaatccggtgactaaaccagttaagccacaaaatacagaccatagtaacgctgcgatgagaaaaaccgtttttggcccaactttatcgctggcccagccaccaataaaattaaacagggcgtatccgataaaaaacgcgctgaagatcatccccatctccgcggcgttaaatcctaactccttttcgatcaagggggcagttatcgacaatgctgaacgatccatatagttgagcatgtaaactataaatagaagaaaaacgataagccatcccattgtttttcttttcatgattaatcctcttattgtggtctagcggcctgaccacaatattttaaggttattttcaaatcacctctcttgtggttagaacgtgatcaatataacaaaaatttatcacaggggatttttatccatcgcaagtgtgatggattaaattctttaaaatcagttgattaattgaaaattcaatcggagctatcgttttcccctaatccacgccccggtaaagtttgacatgcggcgttaacggaaggtggcgctgtctgtgggtatttttcatcgggcgtaatataaacctgactcgtggcgacatagccatcattaaaagttgcttcgatataggtagcttcccaacctgtcttcggttcatttagcgtaatactgatcttattgttgacgggactatctattgtaagcggctgatagcggataccacaggcataacgaaaatcacgcgcatttggattgttggctgtccagcgaacgacttttaccggcgcttctgagaaatagaccgtaagaaggtggtggtgaataaggtcgatcaactgtggtaatgtttttttactttgaaaccggttaataaatggaacgaggcttccttcagcgaactggttaattgagtagtggttcatattaggcactatacgtaatgattttacgccaggaagtttgctataataaaagcgagtgttgtctggtacgaaaaaatcatcgccacttgcattaataatatatttaggtattgcaaggcggggttggtaaatagtgttgagatatcttaacggatctattatttgccttagctgggtaaatgcgggggattttattttctcatctatgccttgctggtagtaggggtagaatgtaatgggccaatttccaccgtatgattgataaatatgctcaagtgaagcatcaatatcaagtagatcaatggcgaagggaacaattgcttcaacatcaggatcggcaatagctgacaaccaggtggtccacccacgctttgaaatacctgtaatgataaaggaatttatattccattgcgttaactccttttttgctaatctcatcgcttgcgatatggcagtgaccataggaatatttaaaggcattaacttacgttgctccggcgcttccataaataatgcccagcttcgggaaacgctttcgtcctctttcagtggttttttatcatcctgaaaggttaaatattggttaggtatatcactcactgatattacgatggtattcgtatcacgggagatgcttgccagtgtttcctgggggaaatcaccgggtttaccagtgatttgtacgcctttatcataattaattccgttgtttacaaccaccaaagcatggtgctcttttgccgtttcagggatataaatatcaacgttatgtcgccattgcgcaggggttaccatgtcatctggcgaccagtgttgcgataataattcatagtgtctgactaccacctgtgctaatggagctgtattaatcaaggtatattttagcggtgtgcctgaaatctgctcccggtagtcggggagaacatgagacaaatcacactccgggctgtttcgacaaaagaagatgttgttatgaagtagtgtataaacttttgtagaaatgaaaaacagtacgataacaacgagatatatttttttcatgctttccccgcgctttacaagggcaaatgccagccagcataatttccataaatacctcttaaacattcaatataagtacaatacttttgataaataacggaagaagggaacaataatgtttgtgacgttgtcacattattctgtttctggtttcactattagcactgaactttttgaaaggtaaatcattgccgtcaccagaccaataatggcgacagagatagctataccgatccagacgccatacagagcataacccaggacaaatccgcccaatacgggggatataaaatcagcgattgcgattaatgcctgcgccgttccgatgacgataccttgtcgggcaggcgatacatggacggacaaggcggcaagataagtgggtttggctagcgcatcagcgatgctaatacaaacgatagcaaaaacaagcacaggtatggtcgtggcgatacccgcagtgagaaatccagtacaaagaagggcgaagatgaggataattagctttcgctccgaaaaatattggctcacccaacctaacagaaatagctgaacgaaaatattaataaccccgtccgccattaacagatagcttaacgcttttggcccaaagggaagcccattccagatgaaggtgtcagaaagaaaaacaggtaattgtgaagagtacatgccataggcgaagaaatgacaaagcattacgatgattaagacgcgaaggacaggcatctttaaaatagcgcgggcagagaacgccgctattttatctgtggtacgtgatgttgtggaagggtcttttaacccccaaatcgcgaccagggcagacccaaggacaagtataaaggcggcgtagatcggcgcgctcagactgatacgcgataaccacccggaaacgcctgccccgacaataccgcctaaaccaatgcagcctgtgaggataccgattgcctgacgccgatttctgacgtgcgtacaatcggcaatataggctgcggcggctgacaaattcccggcgctaatgccaaaaagcgtgcgggcgagcaggataaacaggatacattgcgcgttggcgagtaatagtaaacttatcgccgcaatagccagcgtgacaatcagtattcgcttgcggccaacgcgatcggaaaggtggccaatcaggggcgccgcacaaaattggctaaaagcttcagtggcgatgatgattccaatgataagcggcgaaccgcccatctcgcggatataaaaaggcagtaccgacattacagccgcggtactggcggcgtaaaggccgacaagcaggaaaacaggcaaaatacgccgcttgttgagcggggtgatagtttcgctgtcggtgttctcatagacattagtattcatctttaatccctatggcaaaacgagagagataattttcaatatcgttgctctgtttgccgtgaaagaatgcgccgacatagccatcgggtcggatcagcacgcattgacccggcgccagatgataggattcccggaagtgccccagggtatcgatgagctcgtcctgctcgccaatgtgatgaatacgcagtcctcgccgcgcatcgatgaccttaccatgggtttcgtaggccaacagattccagtccggaccttgtagtaactgaaataatcgtaatgattggccgccggcgcccaaaagaggagcatccggagctctttctcccgcttgtaacccatgctgacgttcgggtaacgtgtgggctaagggggagttggtatactggatgtcaagttgttgaacatcgcgttctcgtttgatgcctctctgtttttgagagtcaagtaatcgggtagaaaggtggagcagtgattcggctatcgggcggcgttcctgttcatagctatcgagaagttcttctcctgcgccccgcagcgaggctgccattttccatcccaggttataggcatcctggatgctggtatttaacccttgcccacccgtcggcggatgcacatgagcggcatcaccggctaaaaataccttacccacacggtaatgttccgctatgcgcgcattcatctggtacttcgatacccagggaatcgaatggatgcgaacatccgtccgcccgattcgttcagtaagaaaagccgtgagcacgtcggctgagaaattctgcgagtcgtccggggccaacaacgcctggatttgaaagagctgcgtgccggcgagagggcaaatcgttatcatccgcgccatatcgccatcgttaaaatggtgccatacatcccggttcagaccggaaagtgaagcgtcagccacaagcgcatggattcccaacgtacgaccggggaagctgacgcctaatttttttctgacaaagcttccgccgccatccgcacctatcaaataatgcgcgatgatgacctcttctccagccggcccggcaacatacgcggtgactgtgcgtggggtttgcgcaaaatgtcgtaactcgcagccgaactccacccgatgtccccatgcttttaattgctctcgcataatcgtttctgtcacgttctgtggaaccatcaatggcagatggtagggttcggcgtgggtcggttttgtatgatgcgcaatatctgaatctacatagcttccgtcgtgacggtaggttcgtagtcggggatagagcccgccggcggcgaccactttattgagtattccaagatcctcgaagatttcttgcgttcgcggctgaatacctttaccgcgggagccgataaaaggcgtcgttcttttctcaatcaggcgaaatgagaccccgtgacgcgccagttcgatggctaaagtaagcccggtaacgccagcgccgcagatcagtacatctgtagtggtgtatcttgtcatcgtctctccgatatgtgtattatgcacataagaggagacatgctatgtcagaaaataaaaatgtgcaagatacacatatttccgagcaaatgaaggcgcttcacggtgcgttgattcgcgtggtgagcgcgcttaaccggcctcgtaatgatgagaaattaattgcagaggcggggatacaactcgatcgtgcgctattttcgatccttattagtatcgaacgtttagggccgattggcgttgttgagttagccgaacgtgccggtcgtgattatacgacggtaagccgacaggtcgccaaactggagaagctggggttgataatacggcagcataatgccatcgatcgtcgtatacgcgaggccgttatctcccgtacaggaaaggcgatgacggagcgtatagacgctgcgcgagagcaaatgggcaacgttgtttttaaagactggcctcaggatgaacttgatgtctttgttcggctaatgcaaaagtttgccgatgcaatggatagcgatgcttcaatgccggaataagcaaaagaaaagggcggtcaaatccgatcgtccaggctaatatcggtatctgacattgattaaatagccagcaaagtaaatataacaacaacatttatcgagttaattttcaccctttgaaaggccaacgtatactgcagaatacggctatataacaatcgccgtatcaatggtttttcaaagggtaaatatatgcttaccgaaaaatatgattttcgcattaccgatcagatgactatcccactcagacctcattggatagccaatgattcatacagggaaaagtgtaaaatgcttgtcctcaaccggagtaaaggggaaattcataaggtagactttagtaaattaacagattatatcaaagaaggtgatgtaatctgttttaacgacagtactataataaaccatatgtttatctgtaaaacaagacagaataggttaattaaaattgttttagagggatttttaccaaataatagagtaattatttccggacttttaaaagaaaggcttaacgcgaatgatgttttctatttggttgataaccctgaaatttccattaagatagagcaaaggtttagcgaggagagccagtaccgggccgtcgtggaaaatcatgaggccttaatttgctatttagccagtcatggtgagcgtcttgatgagtatgtggactccagcttgttttataaatatccagatgcttaccgttccgttttttctaaaaaatatggttctttggaaataccttctgccggcattcattttacctgggatcttatccaaagaatcaaagataaaggtgggttaatatccttcatcactttacatgttgcatcaacagaaatgttgtccaacagaaaaatacaaacaaaatgtgtagaggaagtgactatcaacgaagaatactacgaggttccacaagctacagcggatatcattaatactgcgaagcaaaatggcggacgtatttttgccgtaggaactaccgttacacgatgtctggaatctgcgtattcgagggaacacaattgcctcaaagcaagttctggctggactgcgctttatatacatccaggctatcaactgaaagtggttgactgcctgctaacgaacttacatcagccaaaaacgacgcatatggtgttaactggtcagtttgctggggttgatctactcattaaggcctatacctcagaacatatccagtcatgtcagttcgatatgtttggtgattgcatgttaatcatacaagatgaagggcagggatgaataaaataaaaccggtacatataatgctaccggttttaccgagaataagcatcaggggattcgggcaataacctttatttcgaaatcaaagccggccagccaggtaacgccaacagcggtccagttaggataagggggatgggcaaatatctcctgtttcaccgccatcacgtcgttaagttgttgctctggatcggtatggaaggtggtgacatccactatgtcatcgaatgtgcatcctgctgcagtcagtgttgctttcaggttttcaaaagcaagcctcacttgtttttgaaaatcaggctccggcgttccgtctgtgtgactgcctacctggcctgaaacaaacagtaaatcaccagaacggatggctgcggaatacccatgttcctcatacagagaatggcggtcagcaggaaaaaccgcgatacgttgcgtcataatgttatcctcagatagcgtaaacacttcgggcgggaataaaatgaatgtcacatacacaacgtaggccatagtttcatatacgtggcatatgtcaaggtgccgtcacataaaagaactgagcctgtttgtcgtatcgtttgacgggaaagagagcattttctgagtgattagcttctgtgtcgtgtcattttgtagacggcatcattttcacgctttccaacaccaatgacagttaccgtgataatttcatcttcgacgctgtacaccagcctgtatcctgcaccacgcagcttaattttgtactgatcctttcttccatgtaattgagaagccggaacccgagggttttcaagccgttcccttagcttttttttaaactgttcctgtatggtatgacccagttttttccactcttttagtgctgattcgttaaatgccagcttataagtcatcaatgttgacctcaatgacgcgttcattcgcacgctcatcgataatacgaccgagttcttcatcctcaagaatatccataagatgagcataaagtgccggaggcacacagtagaaagccggttcattgcggttaagaatggcaactggagcgccatctccggcattgaaagttcccattggatcacgtttcagttctgtaatgcttgctgcagtagtcgttaaaatttgaaatgccataatttacctcctggttgatgactaaatatagcacctttaatagtactaataaaagcatccttcacgaaggggattcagctccagcccggtcagtgatgcgggcagctgacggttttttcaaggctaatttcagatgtccagaacctaacttatgaccactgaaaccggcgtcaataactcgccaacccttatcaagcgtgatgtaacaaccgaagtcagccttgcagatggtgatattattttacttggtggccttgctgaacagtcggatggattattctggcctctgacgtgtcgcagattgcagatcgtacagtcagggattacaaccgtattgccagaggaagcgataaaatatggtaagtgatactcttgaacagcggatttatgaactggtaagaagccatgatggaatttacctttttaagaaaaaagaactgacaccgtcaacagatttggattcagatctacagctggaagatgatgaagtactggcattgatggatgatttttttacgacattcaatgtagataaagggaatttctcgatcacaacatactatccgccagaaccaccgctaaaacatttgcttaatccgtttcgcaaaaacgatattcctcaggtgccggatttcacgataggtatgctcattgcgtctgccagggctggttgctggttgtatgactgattcacgctgggggctgctttccgccctccgtcattattgtcaaggctatatgccctaacaagttataggctctataaagatatatattgaacgctaaaataatggactattaggtgacaccatgcccacttataaacaagttgtgaaccatgttaagaaacatgtattgtggaaagatgagtattttgaacgctattatcggctcaatcctgaactggttcagaagcgtttggataaaatttatcaagctgaagatgatctaatggtgcttatcagtactcaattattttgtttcttgcaggctaatggcacgctctattttgatggttgctataaaacagggaaagcagataactcattgctttgtactaatcttgctctatggagtatcgagctagcttgtgatcattttgatattcgggaagagcggggacataccacgaagtttagcgagcagggagagagttggttaacactattcgcctgcaatcaattctctttagttccttattgctatccggccattcagcgcgggtttcaaagcggcgtattgaaagaaattgttccgttttatcgtgaacagaaattgggtatcctggcgatggagataatggcgcgtgaacggggggatacaatcaactgggaagcaatgcaagtgcgtgttgatcctgtctatctggacttttgccaaaacattttattgtcatcagatgatgaactagtccgcaccggattaattacgctatgtgataagcatcttgagtggaccgattttcataatagcgataagcattgttgcttgactggctatgaaattcagcgtcaggatctattactctggccatttgaatatcaggcggtaaaaaactggcgagcacgtcaagggttaagtacaccaatgattgaacatccattgatgaatagcccgatgacgacagcgaattgtcctgacttttcgcagtggcagcgtccagagtggttcaatccgttagttgattttttggcgcagcgcaggcctgagctggcatttttacgacatctctttatttaagtgagcgattattgtccagttttctctgggcctggcgcgcaactccaagcacatgacccagtcttttattatcaacaattgcgacggggtccacctccgacaaccggtcgaaggtggaataggggagcagaacgccattcagccgcagttccttatgcccgtcaggataatgccagacttcgatatatttaccgatggcccggcgactgtgctcgctgtcctcaatctgtggattcagatttcacaaacagcaggtgcatcaggcgactggtggcatagtcaacatagaccaaagcagtacagggtcgaccccagctttcaaaccagtggtggtcgcagccatcaatttgtatcagctcgccagtacaaggccgcctgtaacgaggctgatgaattttcggcgcgcgttatctgcgagggatccagattccggcttttatcatgaggcgtcggatagtttccttgccaagaaccagaccgtgaacttcctccagattttccagcgccagcgtggggccaaaatcacggtagtgctcccggattatacagagtgcctgatctatcagtgaagttggcaacagatggttaccaacgcggccacgactatggttgttcatgccaagtggtccgagttggcgataacgtttcagcagccgtctgcaatggcgtggcgtaatgccgagcatctcagcagcctgaccgggatgtaaattgcggtcgatggcatcctgaaggattttgaggcggttgattcctttcacggtgaacatcccggcgtcatgtctgagaactatagtctggacaatatgagccacaaatagacattagcattgagcctctacaagattggtgcgcataatgtatattatgttaaattcaccagaacatttaaaagacatgttaaagcggctggattcgtgtatgtcaaaaaacttctggcccataagtttgatcccttccctgccgtgacgctgcgcgaattctgttgatttgcacccgcttatcctgcacacgatttcacgcagcacacgccacgcaggcataaaaaaaccggccactgtgaccggttcgtcgcgcaggtttttggctcagtgggttttaccctggtccgctgctttttctgactgatgttctgcagctctgacaacggctataaacgctttgatacccggatccacatccggcgacaacatgcgcattgttgatttggcattcctgccgaacctcgtcaaaaatcgcaggataaccgaacgtgactttaatcagcgtgcgcagcatccctttggccacttccatttcacccgccataattcgccggcgtccaggtcgttatgatactgacaatacactggaaaatctgacggtcaaagcagcaaccggggaaaaacagtggccagttagcacagcgtttgcatgaactggtggatagttcggggaatcagcggaagaccccctattctcaaccatctcctcataggctttcctgaacaatgtgattgtttgagtaactttacgacaattgcttcaaaaactatcaaatgccagacttccgctaccagacggtatacacagtattactatttctttttatatgccccatacaaaagcgatacgggtgttttttctaatatctggatttcatttttatgtgctttatgttcactaaaaatatctgccagacttttacctccaaaggccaggccaattcccgttgctgctgctgaaagtaatgtcaattgcggcatggcaagtgaagctatacctaacgtggctgttcctgcaaaaattaatccagatgagatcttttttttctttgaattcttaatggctgattcatgcgactttccatactcttcgaccacattgattaaatgttttgaaaaattatttgccgcatcttgcatttgatctggtgtttttccttgcaagtcatgccttgagattcttagttcatgccttaaggattccagttgacctctttctctaatcttttttaattccagatcggaaagcgcagtaaggaattttacttccgcggctgaaaggcccattgtaatcgcttgctcttcagaagaaagaggatttaatttaccataatccttgaccaactgctccgtagtccattcatgtaaaaacatatggttactataaataaccggatcaatgcctaatagtgttgccgataattgagttgatcgttgtgcataaattgcaccttcaaccttacccagtaaggttgctatagctgacggcagatcgtaatccagaagatctacctctcttgttgtaaaactctttaaatctgtatcgtaaacccagacttctttttcgatgttattgaaattattaagcaatgtttttaataattctttatttgttaggatcttctggaatgtttcttcgtttctcccaaagtgctcaagaaacgctaaataagtagcgtaatccatttttctatctttaaaaaagagctggcttagaaaagcggcagattgttcatgattgcgttctttatcaaaatccagtaattcaggaacgattagaaaaattggataatcatcatcaatagtcataaacgggatggcgcgaaatagattagaaacatgttcaagtaataccaacctgcgcatgcggacataactattatctggtggcaatgacaaaaatgaatgcagagagctaagagaaggaaaatgtaatggatcaaccattatgatgctatcaaaataaatccccagagatctaaggtgattagatatgttataaccaaagcgttgaatcggaagtaataatcgataacttttagacgcccgcacttctgttataagcgccgcggcgtgagtatcccaaaatttatttagcaacacgattaggtttgtaagttgattatctaactcgggagagctaattagctctttcaggatgaatctacgtaattcttttagttctaaatttctgaatgcatatttatatttttcagaaaaagcgttttccatcaataaaacatattcattctgtatgctttttgtaatactactcatcatctatctccggaaccaccacgcaacgatttcccagtgtagtggttcttatcatgtgtatattgttagtcatgttatcgtagaaaattcagtggtcaataactcattgaggtagctactaaaatttgcagttaccaggatttaggatgattttaaaaatgtttataaattcaggctgcgccgcagtgattgcactgatttccacgtaacatgataatcaatggctttgataccctttaaacgaacaaatatgagcttaacatggcgacaataaaggatgttgcatccatggccggtgtatcaaccgcgactgtatcacgcgtcattaaccagaccgcgtgggttgaacccgtcacgcgcgaacgtgtagagaaagccatgcgcgatctcaattatcgccggaatgccgccgctatcgcgctggcgaaacgcagcggcgatatgctcggattgttaaccggcaatctggctgatcctttttttgcccgccttgctcgcggcgtagaagatgtttctcgtaagcagcagtatcgcttgatggtatgtagcggcggccacgacgaagaaatggaaaaagcgggactggattttctggttaatcaaggttgtgaggctattgttgtacacgccagccgattaccggataaagagctgctgcgctacgcagcccactttccagcgctggttgttgtgaatcgttatatagccggtatggccaaccggtgtatctggctggaaaatcgcagcgccgccagggaagcgacccgatatctcctggcgaacgggcatcggcgcattgcctgtgtgacatctgacttgccaattattgatcgtcaggaacgccttgatggttaccgtgaggcgctggaagaatatggtatttctccagaccctcgctgggtgattagcgttccgtttaacgaagaaggcggcgagcgggccgcgcatcaacttattaatagcgggcttccccttacggcagcggtcacgtttaacgatgtgatggccgctggcattatgcgtattcttcatcaacgcggcgttcagcttccgcaacagctctctattgtcggctttgatgatgtggtgctggcccggtatctttatccggcgttaacaacaatgcattatccggtcgaacaaatggcgcgttgtgccgcgcaactggcgatacagttataccagggcattacgccgccgcccagcagcaatcatttcaatgccgaactggtgatccgcgattctgtcgcgccctatttttcacggtgaatgcgtcgtcaacagtaaaaactgtgatggctatcaaattaacccttctcatgtaatcggttacatggacgaaagtaatggatcacagtagtgggaagcgtatccccctacccttgagctaccttactgaccggagctccattatgagtgcatcacaaaacaagaagaaaacgctgtcattgggtttagcgctaatcccagtcatctccatgttgttattgttgattatcggttacggcattatggggctacgtatcgaaccgctccttctgtgctctgcggcggtagcggcaggcattgcatggtggcaaggatactgttgggaagacatcatcaactcagtggtggataagctggctaaagcaatgccggttatcatgatcctgatctgcgtgggcggtttgattggctcctggatgtttagtggcaccattccctacatggtgtactgggggctaaaactcataagcccggaatatattttgattgcagccttctttttaaccagcgtggtctccgtctgtaccggtacatcgtggggatccgccgggacggttggcgttgcgttaatgggggttgccgccgggctggacgtgtctcttgcagcagcagctggcgccgttgtttctggcgcttatttcggcgacaaaatctcaccgttgtccgactcgactaactttgccgcgattgtcgcagacactactctgtttgagcatattcagcatttactttggacgaccctgccaagtttcctgcttgccgccgtggtttatcttatcgccggacacagtaatatgctgggcgaggtggctacgccgcagcgcgttacggacatcatccactcgctggagtcgctataccattttaatattgttcttattttgccgccggtgatcgtactgtggggcgcaattcgcaaaaagcctgtcatcccattaatgttaagcgcctgcgtacttgccttgttcctcggcgtcatcatgcagggactgagcatcaaacagggactggacgctttcattgatggatttgatatcgccatgttcccacaaggcgcagaaggtgtcgtggccgatgttccgcgcctgctaaaccggggcggaatgttctcgatgatgggaacaatactgttagttttctgcgctttttcatttgccggagcgctaacgttaaccggcgcgttaacaatcatcattaaccgactgctgaccattattcatagcgttggtcaactcattgccgccactatcggcaccacaattttggtcacaggagcgaccagcgacggtaaactggcattgttagttcccgccgaactgtttaaagatgcctatcgtcgtatggggctggatactaaaaacctttcacggacgatagaagatgccggtaccgttatcgaacctctcctgccgtggacctcggctggcgtctacatggcaaccacgctgggcgttagcacgcttgatcttctgccctgggctatccaatgctatgcggcaatcttcttcgcattaatttatggttttagcggaattggtattgccagaactgcctccgcctcagaaaagtcgccgcaatcgtcagtgacggaataataaggaaacaagatggattttaaccagattatcaatcgcaacaatactggttcggtaaagtgggattttattgagcgtcactttggcgatggcgcagggaaactgctgccgatgtgggtttctgatttcgattttgcctgcccgcctgaggttcaggcggcattgcatcagcgaatcgagcacggcgtatttggctatagcgaacgcgatgaggcctattttaacgccctgcttcactggttttcatcacgccaccagctcacgttaaaacaagaatgggtatgcagcgtggaaggcgtcgtaccagggttggcgctcttagtgcaaatgttgacgcatccaggcgacggcgtagtggtacaggggccatactatggctccttcgccaaaataatcacgcttaatggtagaaaactgctggagaatccccttagcgagtcgccggacgatggctaccagatggatttttgccaactggaaaggctgtttcgccatgagcgccctccgctgatgattttgtgtaatccacataatccaaccgggcgttgctggtcggccaacgagctggagcaactgcttttattatgtgaagcttatgatgtcactctcatctcggatgaaatatgggccgatctattgctgcccggcgaaacctttacctcggtactgcatttaggggtgcgctggcataaacgggtcatctccgccactgcggccagcaaaacgtttggcttatcgtcgttgcgaatttctaattttctcattcccgatcctacgcttcgccagcgtttcctgtctcgtctggacgctcatgggctggatgtctttaacgccctctccgttcaggcggcgactaccgcatggaatgaaagcagacagtggctggattcgctactggattacctggcggaaaaccgccgctggtttgttgaacatgcgacagagcaccttccctgggcaagaattgtcccggcgcagggaacctatttattatggatggattgtaaaaaactgggactggatgacgaacagctaaaatgggtaatggcggatgtcgcgggtattgctccttcaatgggcagcggctttggcccggcgggcagcggatttatccgtttaaatctgggatgtccacgtacctaccttgaaatggcaatagacggcctgaagcgaatatcggtgaagacaatcaaaggaataccaacaggcggatgaatttttcgggcggtaaactgacaacggtgttatttctgcggcatgatatcgcctgagcgccagtaaaaaaccggccatcaaggccggttgggtccggagcgcggttttactatcaggggcgtctgaataacacgatactgcgcccggccagatcgaaatccatttcttcggtaatccgcattccctgctgcgcgttatcggcagtcgtcagttcaagtacccagccgccttctccccacatcggaatacggaacggtacgctgccttcaaacggattgaaaagcagtaaggcgtcatgccagatccccgcttccggctgaagatcgggacgactaatacatacgcctatggtcgatccctcatcccattgttcggattgctgcgcccctccgccggcgttaaaccagcggatctccagaccgtcacgccagctctcccggcgcagcaacggttgcgtggcgcgcagttgaatcagatgacgggtaaactcccgtagcgcattggcggtttccggcaaattatcccagtggacccacgatatttcactgtcctgacagtagccattgttattgcccatctgactgcggccaaactcatcgcccgctaataacatcggcgtgccgtgcgagaaaagcaaggtggtcaggaaattacgtttctgtcgctcgcgtatcgcattgatgccctcgtcgtcggttggcccttctgcgccatagttacaggagcggttatcattatgcccgtcattattatcttcgccattggcttcattatgtttgtcgttataagacaccagatcgttcagcgtgaagccgtcatgggcagtaataaagttaacgcttgaccaggggcgacggccgcgcaaatcatagagatcgccggaacccagcaggcgtgcggcgaaatcatttgtgacgttgtcacctttccagtattcgcgtaccgtatcgcggtatttatcattccattcgccccaccctggtggaaagccgccaacctgatagccgcccggtccgatatcccagggttcgccaatcagtttcagttttgccagcaccgggtcttgcgttaccgcatcaaaaaaaccgcctctctgatcaaagccttccggctcacgaccaagaatggtgcccaaatcaaaacgaaagccgtcgacatgcattgactccgcccaatagcgaagggaatccatcaccatttgcagtacccgtggatgagaggtattgacggtattacctgtccctgtatcgttaatgtaatagcgatgctgatcgggcatcgtgcgatagtaagagaagttatcgatacctttaaatgacagcgtggggccaagttcattcccttctgccgtatggttatagaccacatccagtatcacttcgatgccggcatcatggaaagcgcgcaccatatcgcggaatccctgaataccttttggaccatagtagcgcgtcgccggcgcaaaaaagcccagcgagttgtatccccagaaatttttcagtcctttatcgagcagatgctgatcgtccgggaaccagtgaacgggtaaaagctcgacggaggtaatccccagacttttaatgtaatccacgctggctttatgccccatgccttcaaacgtaccgcgtagaggctcagggatcgcggaattaagctgggtaaagccttttacatgcgtttcataaataatggcgttcgaccacggtatggaaggccgttgtctatcctcccagttagcctcatccggatcaatcacccggcatttaggcgtaaatggcgcgctatcctggtcatcaaaggtcaaatctttatcgtcatgaagtaattgatacgcgaaatgcgcatcgttccactgaatatcgcccaccagctcacgggcataagggtcaataagcagcttgttggggttaaaacgatgaccattttccgggtcataaggaccgtaaacgcggtacccatacagcgcgccgggctgcaacttcgggacatagccgtgccatatttcgtcagtatattccggtaactccagacgagcgatttcatgctccccgctcggatcgtaaaggcaaagctcgacgcgttccgcatgggcggaaaaaatagcgaaattcacgccttcgccgtcataatttgcgccaagcgtatggctgtatcctgatctgatttcaaaagccctgtttgttgtcattctctttctccacccacggtaaacgttgtcctgtcacggcacatcaacacataaactcagtcgctcattaaaaccagtacgccgccctggtgtgaggccaacgacaggcgttcaccaggcattaacctctcctgggtaagcacattgcgataacgatgctgattaagctgtccgggtataataatgtcggttcctgaccagaaaccgctatgcgattgtgacaataagccgtcacattcggcgaacaccagtcggggcgcaacaacaatcagcgcatcatcatgattgactctggcgtaagcgatgaccttgtcggcacgctgaccaacagcccgcagcggtatatagtcgccaaaacggaagagctcatgattctgctgacgcagacgcagtaatgcggcggtgacatactgattcacctgcccgttcagccaactctcttcgcgcgagaaaactcccggcgtcagttggtctaactgctgcgccagcgtggcgaaatccggttcgcggcggttgtcgggatcgacaagactaaaattcaacgcctcgcttccctgatagatatcaggtactcccggcgcggttaatttgataacggtctgcgtcaggctgttaaccagtcctgcgcggatgaagggttgcaaggaacgataaaaatcctgcaaaaatgtctgattatccggcgccagtaaataacgggcgtaatcaagcattgccgtttcgtaagcctcattactgtccacccaatcggtacgcagcttcgcttcgcgtagcgctttctccacaaaggcttcaaagcgtgttttcagcgcgtttaggcctgtttcatcctgtggttgtagcaccgggggccagacgccggtcagcgcctgatataacatccacgtatccgccgattttggcgcagtgccatcattcaaaaatttgacatgggtctggttcatctgccgccagcgggcaaggcattcgctccactgctccggcgcttcggtaagcgtatacaggcgtgctcgcgcatcctcgcctcgcttggtatcgtgggtcgacgtaccggataacgcatcaggctgtcgcgcctgtcgggttttcatctcatggtgaaagcgttcgatggagaagtgatgcgtgacgggctcggcgccgacttcatttaacgccagtcccatgttttgacgaaagaaaagcgtatcctctaccgatttcgccatcagcggaccggtgagttgctggaaccgaacgcgaaactgtgtcgcctcctcctggctggaggcgggaacatcgccggtaagaagacggctcagaaatgtaagcgcttctggctgcggaggggtttcaagcgtctttacccgttccacaatacggtgtaacaggcaaatatcggtcggtggtagcccttctgccgtgccgtaagtgcgatatacgggaaaggcaattaataactcgcgtaacgcctgccgaacgacgctctcttcctgtgcgatctgtagctcgctggcaatcgacagcgcaagcgcgagcagccgggtaaattccccctcgaaattgcgatcgaccatcagcaatttagccgcccgtaattccgcccgcatatccactggcgcgccttttacggtctcgtaagcctggcgcagattgtctatctgctcatcgtcaaccagcacctccgccagcgaggcgataaattcatagcctgtggtgccggaaaccggccagtcatcaggaagttgctcgcctttagcgagaattttttccacggtgatatagcacgccggccccacttcctgacgtaaacgcgcaagataggctttcggatcggcaaggccgtcgatatgatcgatacgtaaaccgtcaaccgcccccgttctgaccagctccagaatcagccgatgtgtatcgtcgaagacggttttatcttccacccgcattcctaccagccctgtgacctcaaagaaacgccgatatgaaagcgagcgagcggcatcgcgccaggacattaatttccacggctggcgctcatgcaaatcagcaatagcggctttatcggtaagcgccagtatttcagcctcgcgcccctgccacgtcgccggcgcaagcggataatagttatcataataggcgaacgcgggtttacccgtagcgggatcgggcttgatcgcaatttctccgttttccagcacggcgtcaaacgtgtcgcctaaaaaaggcagcgtcagtcggcgcgaccagtcaatatcgaaatggcgcgcgtaacggctctccttgccatattcaagcacgtcgcgccaccaggcgttttccagcgagctggccatgtgattaggcacaatatcgatgatcaatcccagaccttgcgctttaagttcagccaccagtctttcaaatccttcgcgcccgccaatagaaggctcaatctcattcgcatcggtgacatcataaccatgcgttgacgctttggtggcggtaaagatgggtgaggcataaagatggctgatacccagatttttaaggtaaggcaccagcgccgcagcgcgatcgaaggtcatgccattgcgaaactgaaggcgatacgttgcagttgggatcatgatgcagactctccctgggctaagcggacaataagagaatgttgggaaagcgacccggtggattcattcggccaggcgaagagagtcttacccggtaaatcgggcagcaataccgtcgtggcgctaatattcagcgccagtgacagcgttcctcccggaaaacgccagctaacggcaataaacccgggcgcggtttgcaataccgttcctgagctctcacgggcagcggacaacagcggcacgatatgcttctggcgcaaaagcagtagttcgcgggtaaacgccagccacgctttaccctcttcactgtgctgttgcttccagttaagttttgagcgttgaaaggtctctggcgcattcgggtccggaacattttcccctgcatgatcggcaaactcttttgcgcgaccttcacgaacggcgcgggctaaatccccatggaaatcggtaaaaaaaagaaaaggacggctttcgccatactcttcgcccataaaaagcagcggaatatgcggtgaaagcagcaacgtggcgagcaatacttttgttcgttcagcacccgccagggttatcagtctgtcgccctgggcgcggttaccgacctgatcgtgattctgaataaaatccacaaaagcgaccgggggttgtccggtactttttacgccgcgaggttcgccggtttgcggtgaaatttctccctgataagcgaatccttcggccagcgctcttgcgaggtgtttttccggggcatcagcaaaatcgttgtagtaggcctgggtctctccggtcgcaaaaacgtggacggcattatgaaaatcgtcattccattcggcggtaaacagcggcgcattgccatcctgatctcggggatgcagagaaataatattgcggctatcttcggtggtcagatgaatgggcctgtcggtaatgtcttcccgaatacgttgtgcgatttcaaccagcacatgcctggcgctactgtcctcaatctgatcgatagcgtcaaagcgtaagccgtcgagatggtattctgtcagccagtataacggcgcctcgatgatatagcgccgcacggcgtcgacatcataggcgataccatttccccacggcgtcatgcgctctttgtggaaaaacgccggcgccaatagcggtaaataatttccttccgggccgaaatggttcagcacaatatccaggacgacggaaagaccatacccatgcgcggcgtcaataaacgccttgaaatcatccggcgtcccataggcagaatgcggcgcgtaaagcagtacgccgtcatagccccagccacgctcgccgccaaattgcgcaacgggcatcacttcaataacggtaacgccgagttcagcgagataaggcagcttcgctattgcggcgcggaaggtgccttccggagtgaacgtgcctgtatgcatctcatacaccacggcctgctcccaacggctacctttccacccggtgttgcgccacgtgtagctgcctggatcaaccacatatgacggaccgttgacgtcagttttttgggcgcgggaagccggatcggggaccaccatgccatcgctgagtacaaagttatactccgtacctggcgtcaccccggcgacgtccagcgtaaaccagccgtcaccgttcgcctgcatttcctgatctttacccgcaagcctgagcataaccttttgctgaccggtggcccaaagacgaaagcggacaacatcagcggcgatatattcagccccccagcttttgcaaaaaatttttgaactcatttgtcgctccgtttaacccataacctctacaacatccgaagaacaagcatagactatggggctaatctttacgtgacgctgtcacttaacaggcattctttttcgtatctgcgtgtaaaaccgtggaattattgtcgggattgctcagatgtaccgaagtgcgcggtatcgcctcgcccgtgttcgccagagccctgaacacgctgtagctggataacctctccctgctcccaggcgttagcccccttaacaacgggatgttcaggcagatcctgccgctcgcgtttaatggcttgggtatcaattcccagacggcgatcccgatcggccagcagcgcggggtcaagctgcccgtcgccagtaaagcccatcatcagcgcagggatacccattggcagggttttatcccggtcggtatgccaggtgtgccaggtcttgccataagtattaacaatcttactcatcaacgctttatcagcgacctgcggtaagccaggcgccaccaggctaccggatttcacctcgtactggtggctgtgccacagttttttctcctcgggaggaagcgttttaaataaacgttcgctgataatgtactccacccccatcaggcgcgcgtttttcgtattgccgtcgtaaatcaccgcctgcatgacatcttcgttcaggacggtaacgtaatggtgcgcttccatctgtccgtttttatcaccgctataaaaatggaacccgtcaaggtaggtactgatggcatcgacaggtggtctggattgaatagccgccgcgcctgtttccagggtacgtaatttggcagaggttttttccccgggaataggtgtttgcggcggcgtattattggcgccgcatccggccagaaaaggaatgataaagagtgccagcggtaaaattttcattaggtctccatatagtgaaagggctctaatgaaaatagtgcaataccacgtgattggtagaagaaatggaagatgttatttgtgacggtgtcacaaatagtaaaacccgacacacaggccgggttttgatatcagtttactcttattttgagagttctttcttgatttcgtcttttattttgcttaattcactctgcgggtttttcttacaaagctcaacggctagcggcactgctgtcgtctcagtttcctggaaatctacgtagtccccgcctttaaaatcttcatcttcattcagcacccagaaagcgactggcgccatcgtctgcggattgaggtcaacaaactcctggcagctcatacctttaggcgtaacgtttgttttagtagtatctgttgccgcattcacgctaacactggttaccagcgctgccacgataatacctgctgtagcaagggagaatttattcattgttgttgctccaataattatataaataacctctacatctgcgcgttaacccgttaatgtagaacacagaaaataatacccctcctctctcaggaataaagatcaccctccgtgatatggctattattgatatttacgttgactgattttgatgtttgatgaataaagcaacatggcgagcagattttaaggcgaaaaagtaggccacgacaatagccgcagacgtggtctacggcgcgttgaggtgatagaaatacggcaggatctcagatagaccgggagcgagccctccgtctgaaagtatattcatcagcccgatcaacccatcgttaccgggctggagaggttatcaggcgttaagctggtagtcgagggtgatttccgcattcagaacctgcgataccgggcacccggcttttgctttctggatgatttgatcgaaagttgaagcatcaatatctgctaccgcgactttgctttgtagcgcaattttggtaatggcgaagcccgcctccaccttatcaagcgatacgtcagcggtggtgtcaatggatgtcggcgtaaatccagcctctcccagcatgagtgatagcgccatggagaaacaggccgcatgtgcggcgccaattaactcttccgggttggttccctgcgcgccttcgaaccgggtattgaatccatacggttgttgattaagcacgccgctttctgttgatacagtacctttaccccgtttgatgtcgccttcccagtgtgcctgacctttcttatggattgtcatttttgctctcctgttggctcaaaaaataaagtatagaccatgctgctaatctgcgttgtccatgccgatggaggtagcatgttgtcgattacccgcacttcagatatagaaaatagttgtatgttttttcagtgatgaatattaaaccaacagggctccctttctttaaagaatatatccctccttttgtccttactttttcttctggaggcgtattccattatgtatattttatatgtatattgagatttatcctatcccattgtaataaaggataaaaatcacaataagtagccttttaaatgtatattaattgaccactatttgtatgaggatatgtaattggcaaacgtaatatattttcttcaggggtaaacaattagagttccgccttgcgttaaaataactccaggactaatcttaaccacagccgcaaaaatatttgccatgctgaatacgaattaattttctgcgagccgtactaaataaatacatgttcacggaggcattatatgtttacttatcactcagcaaatacctcagcagcacaaccggccctggtcaacgcgattgaacaaggattacgcgcggagttaggcgttgtcactgaagatgatattttaatggagctgaccaaatgggttgaggcttccgacaatgacatcctcagtgacatctaccagcagaccatcaactatgtggtaagcgggcagcacccgactctgtaaaacctgctatgctgtatcggcaaccttaggggttacgtttctttcgcgtaagcgaatttgtccttaaaactagcaacaggattgaggagttaacatgaaatcgaaccgtcaggctcgtcatatacttggactggattacagaatttccaaccagcgtaaggttgttactgaaggcgacaccagcagcgtggtgaataacccaaccggcagaaagcgccgcgccgacagccaaaagtaatcgtacagtcctgaaatgacgttaaacaccattgcatctgcaatggtgtttttgtttataggaatgaccttaacgtctcacaatgctttatactcagggtcggttccctggtggaaggcaatatatgatgataaacgacggtgccagggacagttattcgaaaaagagtgagtaacatggaaactacaaccaagaaagcacgttccctttatatcccttacgctggccctgtattgctggaattccccctgttaaacaaaggcagcgcttttagcgtagaagagcgccgcaacttcaatttgtcagggctgctgccagaggtcgtcgagtcgattgaagaacaggccgaacgcgcctggctccagtatcaggggtttaaaacagaaatcgataagcatatttacctgcgtaacatccaggataccaacgaaacgctcttttatcgactggtgcaaaaccatcttgaagagatgatgccggttatctataccccgaccgtgggcgcggcctgtgagcgcttctctgagatttatcgccgggcgcgcggcgtatttatctcttatccgaaccgtcacaatatggacgacattttgcagaatgtgcctaaccacaacattaaagttattgtggtgacggatggcgagcggattctggggcttggcgatcagggcatcggcggaatggggatacctatcggtaagctgtcattatacaccgcctgcggcggcattagtccggcctatacccttcccgttgtgctggatgtcggcaccaacaatcaacagttactcaacgatccgctttacatgggctggcgtcatccgcgcattaccgacgatgagtattatgcgtttgtcgatgagtttattcaggccgttaagcagcgctggccagatatcctgctacagttcgaagatttcgcgcagaaaaacgcaatgccgctgttgacgcgctatcgtgatgagatttgctcctttaacgatgatattcagggcaccgcagccgtgaccgtcggtacgttgatcgccgccagccgcgctgccggcagtcagcttagcgagcagaaaatcgttttcctcggcgcgggttccgccggatgtgggattgctgaacagatcatcgcgcagactcagcgtgaaggtttaagcgaagatgccgctcgacagaacgtttttatggttgatcgcttcggcctgttgacggaccggatgcctaatttattgccgttccaggcaaaactggtgcagaaatgcgacaatctccagcactgggataccgaaaatgacgtgttgtcgctgctggatgtggtgcgtaacgtgaagccggatattctgatcggggtttccggccagaccgggctctttactgaagagatcatccgcgagatgcataagcattgccctcgcccgatcgtcatgccgctctctaatcccacctctcgcgtggaggccacgccacaggacattatcgcctggacggaaggcaacgcgctggtggcaaccggcagcccattctcgccggtcatctggaaagataaggtttatccgatcgcacaatgtaataacgcctatattttccccggcatcggacttggggttatcgcttccggcgcatcgcgcattactgatgaaatgctgatgtcagccagtgagacgctggcgaaacattctccgctggtgaataacggcgaaggattagtgttgccagcgcttaaagacatccaggtcgtgtcgcgcgctatcgcttttgccgtaggtaaaatggcgcagcaacaaggcgtagcggtgaaaacctctgcggaagcgctgcaacaggcgattgacgataacttctggaaaccggaataccgcgactaccgtcggacttccatttaatacgtacccggcggtgaatgccgccggatatcactttcttctttagttttggtgagtctgtcgacacacctgaattcctttccctgcttatttgtcaagctactaatattagccacctttatgtattgaacggggatttatcaggataatcctggctaaactattacattgtatttctgccgccttgcataactcatcagaaatattaatcctaaagaggtaatagcgccttacctgctattacttacctgctatgcagttcactattaataaaaggagaaggttatgaaagctgctgttgtcacacaagatcatcaggttgatgttactgagaaaacgctgcgtccccttcgccacggtgaagctttgctaaaaatggagtgctgcggcgtatgccataccgatctacacgtgaaaaacggcgatttcggtgacaaaaccggcgttattctgggacacgaaggcattggcgtcgtggcggaagtcggtcctggtgtcacctcgctgaaacccggcgatcgcgcgagtgtcgcgtggttttatgaaggatgcggacactgtgagtattgcaatacgggcaatgaaaccttatgccgcaacgtgaaaaatgccggttacacggtagatggcggtatggccgaagagtgtattgtcgtcgcggattatgcggtgaaagtaccggaaggtctggactctgcagcggcaagtagtattacctgcgcgggcgttaccacctataaagcggtgaagatttctcatattaaacctggccagtggattgccatctacggtctgggcggtctgggtaatctggccttgcagtacgcgaaaaacgttttcaatgcgaaagtgattgccattgatgtcaatgatggacaactgaaactggccgaggaaatgggcgcagatctgaccattaattcacgtacggaagatgcggctaaaattgtgcaggaaaaaaccggtggcgcgcacgcagcggtggttaccgcggtcgctaaggcggcgtttaattccgcagtagatgccgttcgcgccggaggccgcgtggtggcagtcgggttgccgccagaagccatgaaccttgatatccctcgcctggtgctggatggcattcaggttgtcggttcgttggtggggacacgccaggatctgaccgaagccttccagtttgcggcggaaggaaaagtcgtgccaaaagtcgctttacgtccgcttgaagatatcaacgttatttttaaagagatggaacagggacaaattcgtggccgtatggtcatcgatttccgtcgttaaacgatttgctgtggtcgtctgagtatacagacagcagatgaaaacaaggcgctaccaggatagcgccttgtttatcagattgcgaaagaattactgaataccttcttcgctctctttttttgcttccgccttctcgatttcacgataccagcgtggatgatgtttcttcgcccagcgacggctgaccttcccttcgatcatgcctttaatcgagcctttcacccaaaatgccatatacatatggatgaggatcgcgtgcattaaaataatgcccgccgccgcatgaatcaacaggctataacgcaccacctgcatggggaaatactgcgcgaaatacggacgccagataatcacgccagtcaccagcagcacaaaaatcatgctcataatggaccagaacatcatcttctgtccggcattgtatttaccgacatccgccaccttatgctcattgcctttcaatacttcgacaatatttttcagccacggaatatcttttttatccgggatgttgtggtggacgaaacgcacgaacataaacatcagcgcgatgaagatggcaataccgaagaacgggtgcaaaatacgtcccatctgcggcgtgccgaaagtttgcgtcaaccattgtagcgtcgggaagaaaaacgaaatccccgacagcgctaccaggaagaagcagatcaccaccgtccagtgacaggcgcggtcgacaaatttcgtgcgcacaatcattttcgacttactcatgatgatcctcctcatcgtcgtccgtttctttattcgggccaataccgatgtagtggtaaatcagaccggcgaaagtggcgataaagcccgctgcggccagcggttttagcgcccctttccacagattgattgaggtatcgatctgcggatctttcggcaagccgtggtacaactccggctgattggcatggtgcagcacatacatgacgtgcgtaccgccgacgccctgcgggttgtagataccggcatgttcaaagccgcgcgcttttaacttctccacgcgttgctcacccagttccagcatctcttttttggtgccgaagtgaatagccccggtcggacaagttttgacgcaggccggttcctggcccacgctgacgcgatcgacgcagagcgtacatttataaacgcggttgtcctctttgttgaggcgcggaatattaaacggacacccggcgatacagtaaccacagccgatacagtgttcagattgaaaatcaacaatcccgttcgcgtactggatgatagccccggcagatggacaggctttaagacagcctggatcttcacagtgcatacaaccatctttacgaatcagccactccagcttgccgttctgctcggtttcggtaaagcgcatcaccgtccaggacttggcgctgagatcggcagggttatcgtacaccccgacacaatgaccaacgttatcgcgaatatcgttccattcagaacaggctacctggcaggctttacagccgacacaggaggagacgtcgatcagtttcgcgacttcggctttgtaatcacgcgcctgcggaggcggcgtgatggcgtttgttgcggaccgtttaataatgtcctgcgtttccatagacatatgttcgcctcccttacgccttctcgatgttaactaaaaacgctttgtattccggcgtttgcgagttggcatcaccgacatttggcgtcagagtattggcgatatagcctttgcgcgcgacaccctcaaagccccagtgaatcgggatccccaccgtttcaacctgctgaccgttgacatgcagggtgcgaagacgacgagttaccaccgcgaccgcgcgaataaacccgcgtttactgctcaccttcacatagtcgccgttagcgatacctttcgctgccgccagcgtctcactgatctccacaaactgttccggctgagcgatagcgttaagtagcgcatgtttggtccaggtatggaaatgctctgtgaggcggtaagtcgtgcccacgtacggaaactgctccttcttacccatgcgcagcgcatcttcttcatacagacgcgccgccgggttcgagaccacattcgggtgcagcgggttagtgcccagcggcgtttccatcggctcgtagtgttcagggaacggcccttccgccattttatcaatagcaaacagacgtcccagcccttccggctgcatgataaatggattggtcccgctccccggcgccgcgttgttaaagtccggaatatcgttccctgtccacttcgcgccgttccactggatcagcatccgttttggatcccacggtttaccctgcggatccgccgaagcgcggttatacaatacgcgacggtttagcggccatgcccacgcccaacccagagtattgccaagccctgacgggtcggcgttatcacgtctggacatctggttgccctgctccgtccagctaccggtataaatccagcaggaggaggatgtcgtaccgtcatcgcgcagtaatgcaaaactgctcaacaactggcctttcctggcaagcagtgtaccgttggcgtcatagagatcttccagcgcatagccgttgttctctttcgccacttcttccgaatgcggttcatccggctgcttgtagttccagctcatcttcaatagtggttcggcgcctttaccgccttctgcgcgatacatttcacgcagacgatggtaaataccggccagaatctcgccgtcgttacgcgcttcgcccggcgcgtcctgacctttccagtgccactgtaaccagcgaccggagttagcgatagagccatcctcttccgcaaaacaggtagacggcagacggaagacttcggtctgaatcgttgtcggatcgacatcattagattcgccgtggttctgccagaacgttgacgtttcagtcaccagcggatcgataacgaccagatacttcagtttgcttaagctttgcaccactttgtttttgtccgggaaggacgccaccgggttaaagccctgacagaaatagccggtgactttcccgctatccatcatgttgaaatatttgatcacgtcataggactgatcccacttaggcagccaggcaaagccccagtcattctcttgctgcgccgcatcgccatagaaagatttcatcaggctgacgaagaacttaggataattaccccagtagttgacctgatcggccagcgtcgctttgggggtattcgctgccagataagtttgcagatcggcctgtttttccgatggcagcgtcagataacccggcaggctggtggagagcagtcctaaatccgttaagccctgaatattagagtggccgcgcaaggcgttcacaccgccgccagccatccccatattgccgagcagcaactggatcatcgccatagtacggatgttctgcgccccgacggtatgttgcgtccagcccagcgcatacaggaaggtggtagtgcgatccggaacgctggtagaggccaacacctcacacaccttcaggaaatccgctttcggcgtaccgcagatgttttccacgacgtccggcgtgtagcgcgaaacgtgctgcttcagcagattccacacacagcgtgggtgcgtcaacgtttcatcacgtttggcatagccgttttcatcaaactggtagttccaggaggatttatcgtactgacgcttttgggcgtcatagccgctgaaaagaccgtcatcaaaggcaaaatcatcccgcaccagcaggctggcgttggtgtaatgcttaacgtattcagcgttgattttgttattttcgatcaggtacagcaaaacgccggacagaaaggtaatgtctgtaccggaacgtattggcgcatagatatccgccaccgacgccgtacgcgtaaagcgtggatcaacgacaatcagcgtcgcatcgttattgtttttcgcttccatcgcccagcggaaacccaccggatgcgcttctgcggcattgccgcccatcaccatcacgacgttggcgtttttaatatccacccagtggttggtcatcgcaccgcgaccaaatgttggagcaagacttgctaccgttggtccgtgtcaaacgcgcgcctggttatctaccgccagcataccgagagaacgcgcaaacttctgcgtcagcatacccgtttcattgctggccgccgaggcgcacagcattccggtagagagccagcggttaaccgtgacgccctgctcattcttttcaataaagttggcgtcgcggtcggctttcattaatttagcaatacgagtgaaagcgtcatcccagctaatgcgctgccacttgtcggaacccggcgcgcggtattccggatagcgtaggcgatcttcactgtgaacatagtccagcaaaccggcccctttcgggcacagcgcgccacggcttaccggatgatccgggtcgccttcaatatggtaaatcgcttctttcgcgttttttgccccatctcccaggctatacattaatagcccgcaacctacggaacagtatgtgcaggagttacggatctcttttgcgcgcaacagcttatagtttcgcgcctgagccagggccattttaggggtaaaacccagtgcggccaccgttgttcccgccataccgcccgcgcagattttaaaaaattgtctgcggctgacgtccattgctttcctcttttttccacggatgcacgcctccttcgaactgcagcaaaacctcagcccaggatgcgtgtataacttcgcgaggaaactaacagcaaaatcgataacttttttgcgtcaaatcaatattgaaacggttccgctattaaatagccctatttttaaactgcaataactccagggaggtactaaaaaatgacactgcatggcatcgccctcggaaaaagtgctataagtggcagtttattttgcgcggtattcaggacagtcacaaagcatgacatcacaaaaagcaacgctaatagggcttgttgccatcgttctgtggagcacgatggttgggttaattcgcggcgtcagcgaaggtctcggaccggtaggcggcgcagccatgatctattcattaagcggtctgctgctgatttttaccgtcggattacctgatatccgccgtttcccggggcgatacctcatcgcaggcagcgtactgtttgtcagttatgaaatatgcctggcgctttctctcggttatgccgccactcgccatcaggctatcgaagtcggcatggttaactatttatggcccagcctgaccattctgtttgccattctttttaatgggcaaaaaactaactggcttattgttcctggattgcttattgcacttactggcgtttgctgggttctggggggcgagaatggtcttaatcccggagaaattatcagcaatgtcgccaccagtccgctaagttatttactggcatttcttggggcgtttatatgggcgacgtactgcacggtcaccaataaatatgcgcgtggttttaacggtatcaccgtctttgtgttactcaccgccgtggcgctgtggttacactattttcttacgccgcaacctgccatgatatttagcctaccggtgattgctaaactttttaccgcggcattaacgctggggtttgcctacgcagcatggaatgtgggcatacttcatggcaatgtgactatcatggccgtagggtcttattttacccccgtcatgtcctctgctctggcagcgctgttactcagctcaccactgtcattctccttctggcaaggcgcagtcatggtttgcgtaggttcgctactttgttggctggcaacgcggcggcgctaatagcgacgggcgggccgatattgatattaaatcgacccgctgtaccttgacactcttcataacacaactacgcttttatctattgcctgtgcgtatttaacgattttccattttcacgtgctcctcctgcgccataccaggattgcgctggtaaaaatgaattttataaaatcgttaaatatgttaatgtaatgatgtaattatattaacaaatatataattaacgttagcttgcaactgttattagtgcatataataatcagtggttactaccaaaaataaaaccataaacagcccaatagtcccctccgaaaatatatcttattagacagtccctatttgaattaatactctcaaatgtattaaggagatctcgatcacacaaattaaaataatttgtaatcttatgaaacttattattgaacttatgccactccgtcatttaaaaatagtctgccattgacaaacgcctcgtttaacaatggttgaggaaacacgctaagaaaattataaggattattaaaatgaaacttaagttagtggcagtggcagtgacttccctgttggcagcaggcgttgtaaatgcagccgaggtatataacaaagacggcaataaactggatctgtacggtaaagttcacgctcagcattatttctctgatgataacggaagtgatggtgacaaaacttacgcgcgtctgggctttaaaggcgaaacgcagatcaacgatcagttaaccggttttggccagtgggaatatgaattcaaaggcaaccgtactgaaagccagggcgctgacaaagacaaaacccgtctggcgtttgctggtctgaaattcgctgactacggttctttcgactacggtcgtaactacggcgttgcttacgacatcggcgcatggaccgacgttctgccagagtttggtggcgatacctggactcagactgacgtcttcatgactggccgtactactggtgttgccacctaccgtaacactgacttctttggcctggttgaaggtctgaactttgccgcgcagtaccagggcaaaaacgaccgtgacggcgcgtacgagtctaacggcgacggtttcggtctgtccgcaacgtatgagtacgaaggttttggcgtaggtgcggcctatgcgaagtctgaccgtactaacaaccaggtgaaagcagcgagcaacctgaatgctgcgggtaaaaacgctgaagtctgggctgctggtctgaaatatgatgcgaacaacatctacctggcgaccacctactccgaaacgctgaacatgaccaccttcggtgaagatgcagcgggtgatgcgtttatcgcgaataaaacccagaacttcgaagcggttgctcagtatcagttcgacttcggtctgcgtccgtccatcgcttacctgaaatccaaaggtaaaaacctgggtacttacggcgaccaggatctggttgagtacatcgatgttggcgcaacctactacttcaacaaaaacatgtccaccttcgttgattacaaaatcaacctgctggacgacagcgacttcaccaaagcggctaaagtgtctaccgacaacatcgttgctgttggtctgaactaccagttctaattttgttgtagtctgaatacaaagccagtcctttcagggctggctttttctcttgatgtagactcggtcataaggagtatgccgtgcagacgttcactggtcgttgtctttgcggacagagccattttaccgttgacgtcgaaatgctggatgtctatgcctgccattgtacgctgtgtcaaaaatggtcgggtggaatagccatgtatctggaagcctgcgggcaaccacagctagcccccctttccccggaaccgccatacttttcatcctcttcgcgcggcgaacgctacttctgttccggctgcgggtgtccgctgtggtttcggcttaccgataccgatcgctattttattccctggaccttactggaactgaacgaagttgatcgccgtcggctgattctggctgcggaaatttataccgagacccaacctgccttctggcgactgacggggcaatacgcacgcctcagcggtaaagaggttgaggaaatggactccccctgccagctagcgcattaagcgcttatctcaccaggcgttatgttatcggcgttgggcttttgccaggctgaaccacatccctaccgccagcaaaagaagcatactcccggcgctgcttaacgccacgctatgcgaccagataaaggcatgtctggcggcgtccagtattgcctgcccctgcgtgggcggtaggctattcgccaactgcacggcttctcccattgaagatgacgctctggcaatctcttgcgcctcaagcccggcaggcagacggatagacgcggagaagctacggcttaacaacagaccgaaaatggcaatgcccagtcccgcgcccagttcataagccatcgtttctatcgcgccggccgccgccgctttttctgccggcgcagcggccataattgccgacgtggaagccagcaatgcgctggcggcgctaaatcccagcagcgccatcagcccccaggcctgccattgttgggtgctgaaatccgtcatcgccaggccataaaaactcagcgcgcttaacgccatgccgcccgtcgcgaccagccgtagtcccagacgcgagaccagcacgcccgcaatcggcccgctgaatccactggcgaccattaccggcagcataaataccccggcctcataaggcgatagcccgtgaacaaactgcagctcttgcgccatcagcagctcaaaacccaccagagtgatcatcgcggtcatcgccatcacgacgccgctcaggataatgcgatgggtaaatagtcgcatatcaatcatcggacgcgatgtcgcaagctgtgtgcggataaagagtcccaggagcagcgcgccggtaagcagggtaaacgagataacccacagcgacagatgccctttcagcgcggttttagcgctatagaccaacagcaaaatggcaataatcagcatcaccgcatggccaagattgagcggttgatcgcgacggcccgcctggcgaggaacatagcgggcggttaagcccatgacgaccagcacaatcggcacgttgatcaggaaaaccgatccccagtaaaaatgctctaataatatgccgccgatgagcggcccaaacgccgctccgcccgaacctaccgctgcccagacgcccagcgccatgttgcgatgcttctcttcacaaaaggtagcgcgtattccggccagcgtcgccggtacaatcatcgccgcgccaatagccagtaataccctggtggcgataagccaactggcggtatgcgaaaacgctgccgccaatgacgccaggccaaagagcgtcccgcccagcatcagcaggcgtttaaaaccgatacgatcgccaagtgcgcccatcggcaacaccatgccagccatgaccaaagaataaatatcaatgatccacagcagctcgttgccgctggcccccagtgtcatactcagtgtcggcgcggcgacatgcaagaccgtggcatcaatggcgacaggaatatagaccagcacaataatgactaacgttaaccactgacgaaacataactctcccttcaaaaactcaaatttggacgcttgtccagcttcaggatcctacggtaagttgaacgaatgtccagctttttgttacactgcgcgcattggctaatgtggggaaatatgagttaccttaaccgggatgaacgccgcgaagtgatcctgcaagcggcgatgcgcgtggcgctggcagaggggtttgccgccatgacggtgcgacgaatcgcatcagaagccgatgtcgccgccggccaggtgcatcaccacttcagctcggcgggcgagctcaaagcgctggcctttgtccatttgatccgcaccctgcttgatgccgggcaagttccgccgcccgccacctggcgtgcacggcttcacgctatgttgggtagcgaagacggcggctttgagccttacataaaattgtggcgagaggcgcaaattctggccgaccgggatccgcacatcagagatgcttatctcctcacgatgcagatgtggcatgaggaaacggtcacaattatcgagcagggcaaacaggcaggagaatttacgtttactgctaacgccacggatatcgcctggcggcttatcgcactggtgtgcgggctggacggtatgtatgtactggggattccggaaatggccgatcccgcgtttaaattccatctggatcgtatgattacgcttgaactctttgcgtaaagttacaaataatttaataaaaatcgcttttaatttacaaatagtaacaattaagaaacatcatatctcctcatcgcgccgcgctggcctggttttttatctattctttcactcaatattctaaaaaaacttcaataagttctcaaaagagcgcgtgacgctctgtctcttttttgtgtttttcttcaaatgatatgcgcatgtgaggggtaaaatgacacgacaaaacgagaattataaccgttatctcttgagtgactggcgacccgaaaatccagccttctgggagaataaagggaaaggcatcgccagaagaaacttatggatttcagtaagttgtttgctcctggcattttgcgtctggatgttgtttagcgctgttgccgtcaacctcaataaaattggatttaattttaccaccgaccaactctttttattaaccgcattaccttctctttccggcgcaatattacgcgttccctactcctttatggtgccactgtttggtggtcgtaaatggaccgtattaagcaccgtaatattgattattccctgcgcctggctgggattcgccgtacaaaatcccgccacccctttcggggtatttatgctcatcgctctgttgtgcggttttgcgggggcaaacttcgcgtccagtatgggcaacatcagttttttctttccaaaagccagacaaggtagcgcgttgggtattaacggcggactgggaaatcttggcgtcagtgtgatgcagttgattgcgccgctggttatttttctgccgatatttacttttttaggcgtccagggcgtgccgcaacctgatggctccctgctcgccctcactaacgccgcctggatctgggtgccgttactggctgtcgcgacgcttgccgcctggtttggtatgaacgatatcggcagttcaaaagcgtctgtcgcctcgcaattgccggtgctaaaacgtctgcacctgtggctgcttagcctgctgtacctggcgacattcgggtcattcatcggcttttccgcaggtttcgccatgctcgccaaaacgcaatttcccgacgtaaacattctgcaactggcgttctttggcccctttatcggcgcgctggcgcgatcggcaggcggcgtgatctccgataaattcggcggcgttcgcgtaacgctcattaattttatctttatggcgctgtttaccgccttgctattcctcacgctgccaggctccggcgcaggcagctttagcgcgttctatcttgtttttatgggcctgtttttgacagcgggtctcggcagcggttctaccttccagatgattgcggtgatcttccggcagatcacgctctacaacgtcaaactgcgcggcgggagcgatgagcaggcgcagcgcgaagcggtgacggataccgccgccgcgctcggttttatctccgctattggcgctgtgggcggcttctttattccaaaagcgtttggcacctctttggccttgaccggctcgccggtgggcgccatgaaaatctttttgctgttttacctcgcttgcgtcctgctgacctggctggtctacgggcgtcgtaagcctaaacaacaataacaacatacgcacctgtaggacggccatccggtaatggtttaacgccaaatcgacaggatggcggaaaatttatcgaagcaggagaaatgtcatgagtaaactgttggatcgctttcgttactttaaacaaaaaggcgatacctttgccgacggccatggtcaggtgatgcataccaaccgcgactgggaagacagttatcgccagcgctggcagtttgataagatcgtgcgctcaacccacggcgtcaactgcacgggctcctgtagctggaaaatttatgtcaaaaacggtctggtgacgtgggaaacccagcaaaccgactacccgcgcacgcgtcccgatttaccgaaccatgaaccgcgcggctgcccgcgcggcgccagctactcctggtatctctatagcgccaatcgtctgaaataccctctggtgcgtaagcggctgatagaactgtggcgcgaggctctttcccggcacagcgatccggtgctggcatgggaatctataatgaacgacccgcaaaaatgccaaagttacaaacaggtgcgcggacatggcggctttattcgttcgaactggaaagagctgaatcagctcattgccgccgctaacgtctggacaatcaaaacctatggtccggatcgtgtggcggggttttcacctattccagcaatgtcgatggtttcttacgccgccggaacacgttatctgtcattgcttggcggtacttgtctgagcttctatgactggtattgcgatcttccgcccgcgtcgccaatgacctggggcgagcagactgacgtgccggagtccgccgactggtataactcagcctacattattgcctggggctctaacgtgccgcagacgcgtaccccggacgcccacttctttaccgaagtgcgctacaaaggcaccaagacgatcgccatcaccccggactattccgaagtcgctaaactgtgcgatcagtggctggcgccaaagcaaggtaccgacagcgcgctggcgatggccatgggtcacgttattttaaaagagtttcatctcgataatcccagcgactattttcttaactattgccgccgttataccgacatgccaatgctggtcctgttggatgagcgcgcagacggcagttatgtaccggggcgtatgatgcgcgcgtcggatctggtggatggactgggagaagccaataatccggaatggaaaaccgtcgcgctcaacagtacgggcgaactggtcgcgcccaacggttctatcggttttcgctggggcgaaaagggaaaatggaacctggaaccggtggcggcgggcgtcgaaactgaactgtcgctctctttactcggtcagcatgatgacgtggcgggtgtcgctttcccctattttggcggcaacgaaaacccacattttcgcagcgtgcggcaggaaccggtgctggtacgtcagttaccggtgaaacgcctggctctggcggacggtagcgagcggatggtcgtcagtgtttacgatctggtgctggcgaattatgggctggatcgtggtctggatgacggccatagcgccaataattataacgacgtaaaagcctacacgccggcctggggcgaacagattaccggcgtgccgcgtcgacatatcgaaactattgcgcgtgaatttgccgagaccgcccataaaactcacggtcgttcgatgatcatcctcggcgcgggagtgaatcactggtatcacatggatatgaattaccgtgggatgattaacatgctggtgttctgcggctgtgttggacaaaccggcggcggctgggcgcactatgtcggccaggagaagctgcggccgcaaaccggctggctgccgctggccttcgcgctggactggaatcgcccgccgcgtcagatgaacagtacctcgtttttctacaaccatgccagccagtggcgctatgaaaaactgactgcgcaagagttgctgtcgccgctggccgatccggctaaattttccggacacctgatcgatttcaacgtgcgcgcggaacgtatgggctggctaccctcggcgccgcagcttaatcttaacccgctcagcgtgaaagcgagcgccgataaagccgggctgtctgcggcggattataccgtgcaggcgttgaaatcaggcgctatccgttttgcctgcgaacagcctgacagtggtcataatcacccgcgaaatttatttgtctggcgctctaacctgctcggctcctccgggaaaggtcatgagtacatgctcaaatatctgctgggcacagacagcggtatccagggcgaagcgctgggttccagcgaaggaattaagcctgaagaggtggaatggcagtccaccgcgattgagggcaagctcgatctgttggtcacgcttgatttccgtatgtccagtacctgtctgttttccgatatcgttttgccgaccgccacctggtatgaaaaagacgatatgaatacctcggatatgcatccgtttatccaccccctttccgctgcggtcgatcctgcctgggaatccaaaagcgactgggagatctacaaaggtatcgccagcgtcttttctgaagtgtgtgtcggacacctcggacaggaaaccgatgtggtgctacacccgctccagcatgattccccggcggaactggcgcagccatttgatattctcgactggcgtaaaggcgagtgcgaacttattccgggcaaaaccgcccccaatatcgtcgtggttgaacgcgattatccggccacctatgaacgttttacctcgctgggtcccctgctggataaattaggcaacggcggtaaggggattgcctggaatacgcaagatgaagtcgatttcctcggtaagctcaattacaccaaacacgatggcccggcgaaaggacgtccgcgaatagacaccgcgctggatgcttcggaagtgattcttgccttagcgccggaaactaacggccaggtggcggtgaaagcctggcaggcattgggcgagatgaccgggcgcgagcacacccatctggccatcaataaagaagatgagaaaattcgctttcgtgatatccaggcgcaaccgcgcaaaattatctccagcccgacctggtcaggactggaaagcgagcatgtctcttataacgccggatataccaacgtacatgaactgatcccgtggcgcacgttgtcggggcggcaacaactctatcaggatcatgcgtggatgcgcgcttttggcgaaagcctggtggcatatcgtccgccgattgatacccgcagcgtcagcgaaatgcgagaaattccgcccaacggtttcccggaaaaagcgcttaacttcctgacgccgcaccagaaatggggaattcactccacctacagcgaaaacctgctgatgctgaccttgtcgcgcggcgggccgattgtctggatcagcgaagccgatgcccgtgaattgggtattgaagataacgactggattgaagccttcaacgctaatggcgcccttaccgctcgtgcggtggtcagccagcgcgtcccgccgggtatgaccatgatgtaccacgcccaggagcggattatgaacattccgggttcggaagtgaccgggatgcgcggcgggatccataactccgtgacccgggtctgtccaaaaccgacgcatatgatcggcggctatgcgcaactggcttacggcttcaactattacggaaccgtgggttcgaatcgcgatgaattcatcatgatcaggaagatgaaaaacattaactggctggatgatgagggccgggatcaggtacaggaggcgaaaaaatgaaaatacgctcacaggttgggatggtactgaatctcgataaatgtattggctgtcacacctgctccgtcacctgtaaaaacgtctggaccggacgtgaagggatggaatacgcatggttcaataacgtcgaaactaaaccaggcatcggctatcccaaaaactgggaggaccagcaggagtggcaaggcggttgggttcgtgatgttaatggcaagataaggccccgtctgggcggcaaaatgggggtaattagcaaaattttcgccaacccggtgattccgcaaatcgatgattactatgaaccctttaccttcgattatcagcatttacataatgcgccggagagtaagcatcagcccactgcccgccctcgttcactgatcgacggaaaacggatggacaaggtgatctgggggccaaactgggaagagctgctcggcggcgagtttgaaaaacgcgcccgcgaccgcaacttcgacaacatacaaaaagagatgtacggtcagttcgaaaacaccttcatgatgtacctgccgcgcctgtgcgaacactgcctgaaccccagttgtgtcgccacctgcccaagtggcgctatttataagcgtgaagaagacggcatcgtgctaatcgaccaggataaatgccgaggctggcgtttgtgtatcagcggctgcccgtacaaaaaaatctactttaactggaagagcggcaagtctgagaagtgcatattctgctatccgcgtattgaatccggccagccgaccgtttgctcggaaacctgcgtcgggcgcattcgttatcttggcgttctgctctacgacgccgacaggattgaagaagcggccagtaccgaacacgagacggatttgtatgaacgtcagtgcgatgtgtttctcaatccgcacgatccggcggtcatcgaagaggcgcttaaacaaggcatcccgcaaaacgtcatcgacgccgcccaacggtcgccggtgtacaaaatggcgatggactggaagctggcgcttccgctgcacccggaataccgtaccctgccgatggtctggtacgtaccgccgctatcgcccatccagtcatacgctgacgcgggcgggttgccgcacaatggcaatattctgccggcggtggaaacgctgcgtattccagtccagtacctggccaatatgctcagcgcgggcgataccggcccggtcattcgggcgctaaagcggatgatggcgatgcgccactacatgcgctcgcagacggttgaaggcgtgacggatacccgcgccattgaggaagtcggtctgagcatacaacaggttgaagagatgtatcgctacctggcgattgccaattatgaagatcgttttgtcattcccaccagccaccgggaaatggcgcgcgatgcctttccggagcgcaacggctgcggctttacttttggcgacggttgccacgggtcggataccaaattcaacctgttcaacagtagccgtattgatgccatcaatatcaccgaagtacgtgataaagcggagggggaataatgcaaatcctcaaagcgattggcctgttgatggagtatccggacgacgagttgtgggaatgtcgggatgaagcgctcacccttatccaacacgatgcgccaatgctggccgacttcactcgcgagctgctttatgcgccgttactggataaacaagcagaatggtgtgaagtgtttgaccgcgggcgcgccacttcattgctgttattcgagcatgttcatgcggagtcccgcgatcgcggccaggcgatggtcgatttgttaagccaatatgaaaccgtgggcctgcacctcaactgccgcgaactgccggatcacctgccgctctatctggagtacttaagcgtgttgccggaagcggaagcgcgcgagggattacagaatattgcccctattctggcgctactgggcggtcgcctgaaacagcgaggagcgccgtggtatcaactgtttgacgccctgctgacgctggcgggcagcacgcttacaagtgacagtgtcaccaaacagattattcaggaatcgcgggatgatacccgtcaggcactggatgccgtctgggaagaagaacaggtgaagtttatcgaagataacgccacgacctgtgacagttcaccgttacaccattatcaacgacgctttagccaggacgcggcgccgcagtacgtcgacgtcagcgcgggaggcccgaaatgatacagtacctgaacgtctttttttacgacatctacccctatatttgcgccacggtattcttcctcggcagttggctgcgctatgactacggacaatatacctggcgcgcgtcgtccagccagatgctggacaagcgtgggatggtgatatggtcgaatctgttccatattggcattctggggatcttctttggccatctgtttgggatgctaacgccacactggatgtatgcctggttcctgccgattgcggtaaagcagcagatggcgatgatcctcggcggcgtgtgcggcgtattaacgttgatcggcggcgcgggattactgtggcgtcgtctgaccaatcagcgtgtgcgggcgacatccactacacctgatattatcatcatgagcattttgctgattcagtgcctgcttggcctgagcaccattccgttttcggcgcaatatccggatggcagcgaaatgatgaagttggtgggctgggcgcaaagtattgtcaccttccgcggcgggtcttcggaaatgctgagcggtgtggcgtttgttttccgcgttcatctggtgctgggaatgactattttcctgctcttcccgttcacccgtctggttcatgtctggagcgcgccgtttgagtatttcacccgtcgctaccagattgttcgtacccgccgctaattctctttgcccggggatacgcttaccgggcaaagaaaaacgcctgggcgtcgtcattcggcaacgcacaggctatgatgattcttcagtcaaaggagaacatcaatgaaaccgcagatttaccatgttgacgccttcaccggcgacccctttcgcggcaactctgctggcgttgtcttacatgcggatacgctaagcgacgcgcagatgcagctgattgcccgtgaacttcgtcactcggaaaccgcctttttgctaaaaagcgaagagagtgatgtgcgcatacgctactttacaccgacagtagaagtccccatctgtggtcatgccaccgtggccgcgcattatgttcgggcaacggtactggggttgggaaacaccaccgtctggcaaacctcgttagcgggccgtcatcgcgttgaaattcatgccgaacacaacgactatcgcatcacgctggaacaaggtcagccctcttttgaaccaccgctagtcggagagattcgggctgccatcatcaccgcactgaacctgactgaagatgatatcgtgccgggagcgccaattcaggtggcttcaacaggacatgcaaaagtgatgatcctgctcaaaccagacgttgatattgatgccctttctcctaatctggcagccctgacggcaatcagccagcaaattggctgtaacggcttttttcctttccagattcgtccgggaaaaaacgaaaccgatgggcgaatgttttccccggcgataggaattgtggaagatccggtaacgggaaacgccaatggcccgatgggggcatggctcgtccatcatggcctgatggcgcatgacggtaaaacgctgcagattcaaggccatcaggggcgcgctttaggcaaagagggtactgttgatgttaccgtcaccattcgcgataaccagccggaaaacgtcaccatctccggccaggcggtcattctgtttcatgccgaatgggccattactttttaatctttgtcaggcccgcaaatcctcgcggcaaaaaattattttcccgcctctggatgggtatcaaatgcagccattaccgcggccagctccgcctcggtaaaaccgtgctttacatcatttacgccgagaccaaactgctgctgaagtaactgatacaacgacggtacatccggtacattgacctgttcaacggcatgtccctggtggtaacgcgtgaagtggaaattcgttaatgtcagcttgccgccatcaggcaaatggcggcacatcaacaaatgatgacgaaaatgggattgcggccagtgagccgaccagaaattgcccatcacatgatcgctctgctgctgcacccccagatcaaaacagtacatcgactgccagtgctcatggtggcggaattgtaaaatccatgtgcttccctcctgcatcaggcggtattcgccatgcggcgtttgctgggcaatttcagcctgcagacgaagcggtgcggttagcgtttggccgccaaaccccacgtccgcgatccactgctcatcctcaacatcaaccagcagcaaacggtgcgtgcgcggcggtaaactggcgggatgagacagaatgacccgccccaataagcttcggacgttaaaaccgatgtcgcgtaacgcgcgttcaaacaggccattcagttcaaaacagtatccaccgcgtcgggcataaagcagtttctcctctaatgccgtctcatcgagctgtatttcacgaggcagtagcacatccagattttcaaaaggaatcgcgcagttgtgcgctaagtgaagcgttctgagcgcttcaaccgtaggaacccccaacggctgacaatgtaatcgcgtaaaataagcatgtaaaaaagaggtcatctgaggcttccattaacattaatgcttgcgttcggcacacaggctgaggcggatatcgctgcgcaacaggataccctatccgtggaatagcgttggatacttttgaaaaaaataagacaggccggctgtcgcgccggaggtacgtggaattttggcgtacaaacggaaatcgggttctgagaatctctttgcgacacgccgccaaaatagcggcgtgttaaaatttttaacgccggctcagcgagtctgatttctaacaaaactggctaaacataaacgctttttaataattgtccaaatagttatggtagcgagcttttatgtcggccgcccattgcgctttcgcctcctgcatgttgctggcccgagcgatataatattctaaacacggaatggcgcctaatgcctgaggtaaggcattatatgctgccattcgctctctgacggttttatatttttcatcaatatcataatcatagtacgctggcgcttcaaaaaagccctcttccagtctcatacaaatctcttcaaaggtcccctcaacctcaacggtatgttccccatccgatatcctgacgattggcttaccttcagctatcagcgagagttgttcgaatgttaacatccgaccatcagaaagctcgacatctatagtaaacagtccatcacgtacagcatcagcaaggtgattatggatattccctgcattggcacagaactccgcaactttaggcgtaacattacaataatgttcaattactcgcgtaaatccgtaggccagtcctgcggtaagcacatacaagatgcctttcatgatttttgttgataatttattttcataatctcctgcagcaacatgaggtagcttatttcctgataaagctctggcataggtagaaactgatgtatatggcatatcctactccttcaaattttgctcaatagctttatatgtcctactcctctctcattatgacgatatgtcaatcaacaaaattgctcaaaggcatacattttcaggagaaaatgagaataacaggcgcaacggcctgatcttatgctgcttcaatatcgtcaggtggtttatcgttcgaggtcatatctatgaccataaatccctgcagggattaaccctgattaattattgcgcaacgcaatcactgccgatttgtgctggcgtcttatctggctgaatcgtgaccacaccgcaccacatctgaccacacaaataaactcgacatcctcattttgttctttccgtatgttttgcgtcatttaacaattgcaggtaggatgctccgccggcggttttatccctgtcacagaatcagggaaaagcggcattcgccattgcaggcaatcgattggtgagcgcccgtcgcggcataaggaatttttctgtcaggacaggctataacaggtaacgtaatgaaaacacagactacgcacgccgcagaacaacatgcggcgaaacgacgctggctgaacgcccatgaagaggggtatcacaaagcgatggggaatcgtcaggttcagatgattgctatcggcggcgcgattggcaccggtttatttttaggtgcaggcgcccgattgcaaatggccggaccggcactggcgctggtctatctgatatgcggcattttttcttttttcattttacgcgcgctgggcgaactggtattgcatcgcccttccagcgggagcttcgtctcctacgcccgtgaatttttgggtgaaaaagcggcctacgtcgcaggctggatgtactttattaactgggcgatgaccgggatcgtcgatatcaccgcagtggcgttatacatgcactactggggcgcatttggcgacgttccgcaatgggtgttcgcgctcggcgcgttaaccattgtcggtaccatgaacatgatcggcgtaaaatggtttgccgaaatggagttctggttcgcgctgataaaagtactcgccattgttatcttcctggtggtaggcacgatttttctcggtaccggtcaaccgcttgagggtaatgccaccggttttcacctgattacagataatggcggctttttcccgcacggcctgttgcccgcgctggtactgattcagggcgtggtgttcgcttttgcttcgattgaactggtcggtaccgccgctggggagtgcaaagatccacagaagatggtgccaaaagccatcaatagcgtgatctggcgtattggtcttttctatgtaggatcggtcgtattgctggttttgctgctgccgtggaacgcctaccaggcggggcaaagtccgtttgtcaccttcttttctaaacttggcgtgccttatatcggcagtattatgaatatcgtggtgttaaccgccgcgctttccagcctgaactccgggctttactgtacggggagaattttacgttcaatgtcgatggggggttccgcgccgaaattcatggcgaaaatgagccgtcagcatgtgccctatgcgggtattctggcgactctggtggtttacgtggtcggcgtgttcctgaattacctggtcccctcccgcgtgttcgagatcgttcttaattttgcctcgctcggcattatcgcgtcgtgggcgtttatcatggtgtgccagatgcgtttacgccaggcgataaaagaaggcaaagccgcagacgtcagttttaaactgcccggcgcgccttttacctcctggctaacactgctgtttttactaagcgtgctggtactcatggcgtttgactacccgaatggaacttatactatcgcctcgttgccgctgatcgctattctgctggtcgccggctggtttggcgtgcgacgtcgcgtggcggagatccatcgcactgcgccagtgacggcggattcgacagagagtgtcgtattgaaagaagaagcagcgacataacattccccttccccggcagccccaggcctgccgggtttaatgcgcgttgccgccaacaccgcatcgcgcccaatgcttagtcagccttaatcaactgcgccacatcattgctgttaatttcccgctggttgccttcctgatcggtataactggtcatccccgtctctttatctaactgcggcttaccctgagttacgatcgtttgcccattcttcgtcgtcatcacatagttggttgtacaacccgcaagcataaaaaacatcatgcccaaacctgagcatataaataactttttcatattttcctcgtgaatataatgagttaactacagcaaaaaggcagtgtaattctcacagaatcatcaggctatcggcggggtgtaacgaggcgtatcggtgcgtttaaagagatgactggaggggtttccccctccataccctatttacagagcaatgcgaataacatcatccggctgcgtcgcttcctgttcacgtgtcgatttctgcttcacgctgacgtagagcgttttaccgtctgccgatagcgccaggctattcgggtacgtcggcgtatcgaacgttttaacaacgttataggtcttcgcatcgatcacgctgacctgacctgcctgacgatgtgtcacatacgcctcgttacgtgtcgggttaaacaggacggccaaagaagcaggcgccgcgattttggcaagaatattgccattacgggtatcgacaaccagaacctcagtcgccttcgagtcggtgataaacgcgcgatgacctgcggtatcgagactcaggttaataaagaagtgttctttaccgtcatccagcaacttcttacgactgagaattttattgctggcggtatcgatagtgataaattcgccatccgcattggtggtgtacaggcgttgcgctttactgtcgagcgccagacccgtactcattttgccggtattttcgatcgtcgttttcagtttgatggtttcgccatccactacccaaatagcactctctttaccaacaccgctaatgtagatcgtgttggtcgccgcatcggcaaccagctcacggggctgtaacggacgaacctcttcagtacgtttgcgcgcatcaagtaccagacgaccttttacatcacccgttttggcatcaatcgcggtaactgcgctgttaatggtattgccaaaccacagcgtttgggtcgcggcattgatggtggcgccgaacggcttgagatcgttatgaatcgcttgcgtgatttccagcgtcaccgggtcgagacgataaactacgccgcctttatccagtttacggctttgcgatgtagccagccagagcgcgttttcttgctgactccaggccatctcataagcgcctttgcctaccgctttacgcagcatgtcttccgccgccagcgtgctaaatgaggatgcgacgaggagcgaacctaacaataaagaaccacgcaggcgcggcgaaaaaagatgacgtaagtgcatgacgactccctttgataaaaacgtgtatagctgcttcacactacttcgctgcgcgggatcttcgttccgcacttattataagttgagaataataatcattatttatcagaaagtggagcttttcctcgcctgcgaatgtcatggctcttaaataccgcacattttcttaacttaatgtgcgattaaaatttcaaaactttacatattgactacccttaatgtcacgttttccgttgatacgcttacatttatccggcattttcatgaaaattatttccgttagacagcgactttatcccgccctcttattgcctctgaccttctccccggtccttcaggccgccagcgcgcccaatgaacaaaccatgatagtcaccgcaacgccgcaaaccgtatccgagctggatacacctgccgccgttagcgtcattgagggagaagacatgcgtctggcgacgcctcgcgttaatttatctgagtctttaaccagcgtcccgggattgcaggtgcagaaccggcagaactacgcgcaggatctgcaaatctctatccgtggatttggctcgcgttccgcctttggcgtgcgcggcattcgtctgtatgttgatggcattcccgccaccatgccggatggacaaggccagatttcgaatattgatattaacagcatacaagacgttgaagtgttacgcggccccttctcagcgctatacggcaatgcttccggcggcgtaataaatgtcaccaccgaaaccgggagacaaccgcccacccttgaggccagcagctactacggcagttatggaagctggcgctatggactaaaagccacgggcgcgatgggtgacggcacacagccaggcgacgtgtattacacggtatcgactacccgtttcaccacccacggctaccgcgatcacagcggcgcgcgaaaaaatctggctaatgccaaactgggcgtgcgccttgacgatgtcagtaaactctcgctgatttttaatagtgtggacattaaggcggacgatcccggcggacttaccgaatctgaatggaaagccgatccgcaacaggcgccgcgcgctgaacagtacaatacgcgtaaaaccatcaaacaaactcaggcaggattgcgttatgaacgtcagctcagcgcgcaggatgatatcagcgtgatggcctacgccggagagcgggaaaccacgcaataccagtctattcccctggtggcacagctaaaaccagcccaggctggcggcgtaattacactgcaacgccactatcagggcattgattcccgctggactcaccggggagaattaggtgtgccggtcaccttcactggcggagtaaattatgaaaatatgagcgaaaaccgcaagggttacaataatttccgtctcaacaacggcacccctgagttcgggcataaaggcgatttacggcgggatgagcgtaacctgatgtggaatgtcgatccttatctgcaaacccagtggcagcttacgcaaaaactctcgctggatgctggcgtgcgctacagttccgtgtggttcgattctaacgatcactatatcgcgcccggcaatggcgatgacagcggcgacgccagctatcaccactggctacccgccggatcgctaaaatatgcgttaactgacgcctggaatctctatcttgctgccggtcgcggatttgaaactcccactatcaatgagctttcttatcgcgctgacggccaaagcgggttcaactttgacctcaaaccgtcgaccaatgatacggtggaagtcggcagtaaaacgcggattggcaacggcttgttgaccgccgcgttatttcaaaccgataccgatgatgaaattgtcgtcgccagcagtatgggaggacgcactacctacaaaaacgcgggcaaaacgcgccgccagggcgcagaacttgcgttggaccagcgcttcgccggcgactggcgggtgaaagcatcatggacctggctggatgcgacctatcgcagtaacgtttgtcaggggcaaaactgtgatggaaaccggatgcccggcatcgcccgtaatatgggattcgcctcattaggttttatcccggatgaggggtggtacgccggaacagacgttcggtatatgggcgatatcatggccaatgatgaaaataccgccaaagcgccttcgtataccgttgttggactaaatacagggtataaatttaattacagtcagcttaccgtcgatatttttgggcgggtagataatctatttgataaagaatatataggttcggtgatcgttaatgaatctaatggccgatattatgagccagcgccagggcgtaactatggcgtggggattaatctggcatggcaatttgaataaatatccggcaaatatccggcaatagcggggaatccccgctattgataagtcatagtttcatgaaagttacatgaagtactgatttttaatcgtcgctacgttttgttgcaaaacgttctgtaggcagtggcgactggcttctttatcaccagtcactaacgcattaagcaattttctgtacagattaacgccgttttgataatcatcaagtttaaaattatcatataaaaaatgcagacttggccccaggcgtacccataattgctcgatcatggcatacagcgttggcatatccgcgtagtggtagatctcaaagcggaatgcgcggttggccaaaagaattttctccataacgccactttccagcgcctgttgaaattcatctaatagcgcattcagcgtctgctcgcgatccggggtaatcttacccgcagcggcgaccaccgccatctcctccagggcagtacgaatcgtattaatttccagcaaactttccagcgagatctccggcaccataaacgcctgtgctggcgccaccgccaaagcactggaagagaccagccttaacagggcctcacgcaccggcgtaatactgacgcctaactcttgagcgatatttttagtgataagccttgcgcctggttttaatgcgccaatagacaattgatgctttaaccgattttcaacctgtgtggtcaggcttatatgttgtgttttttccgtacccggcattttccttccttcacctcttggcagaacaacatcgcaatcgagtcccgaagaagtttcggaacttaattgtaaaaaagataatccaggcctgaacggccaaataaataaaagtgataatttacttgcgtgatattctcatcttttacaacaatacaggtttctttatggcaaccgttttatctccgtcattccttcatgtatcgagatttttgaccggttcaggccgctgagggagataagctgccccaccgcgatctgaatgatgaatataagtaaagccgcaattttaaaatttgcacatttttatggcgacataatgccgccattttttctttacgcatcgtccgctaaacgtatcacgactttgccaaagttcttccccgccagcagccccataaacgcttctggcgcattttccagcccatcagtaatctgttcccgataatgtattttcccttctttgatccaacgccccatttcttgctgaaactcatgtatccggtgaccatagtcctggttgatgataaaaccttgcagacgaatacgctttttaagtaatgtcgccatcagcagaggcagtctgtctggaccgtccggcaacgctgtcgcattgtagccgctgaccagaccgcagagcggaatccgcgccgacgtattcagtagcggtaagacggcgtcaaagactttaccaccgacattctcataatagatatcgataccctgcgggcaggcctgcgcaagctgttgtgggaaattatcagcgtgatgatcaaggcacagatcaaatcccaaaacgtctgtcgcatgacggcatttttccgcgccgccagcaatacccacgacccggcagcccttcagcttgccaatttgcccaaccgttgcgcctacggggccggtggcggcggcgacaaccagcgtttcgccctctttcggctggccgatatccagtaaccccatataggcggtaaaccccggcattcctaaaatacccaatgaccaggaaggatgttgcggattatcacccagctttaccaacccttcgccatctgaaatgtcataatcctgccaaccattgtaactcaacacccattcgtctggtcggtaatcaggatgattcgacgcgacaacgcgactgaccgtaccgccaaccataacgcagccaggttcaacaggcggcgcataagagggttcatcgctcatgcggccacgcatataagggtcgagtgataaaaaaacggtacgcaatagcacctgcccttcaccgggcgtcgcgacgtcatcttcttcgaggcggaagttatccatctgcggcgcgccgtggggacgcgaggccaaaacccaacgacgatttcggttggtctgttgcttcattctattctcctcatgcctggcataatccatcaataatagtcgaacattagctttctgagggagttaaacactctcagatatcaggctgtgcgcttttatgaacgactttctcccccttctcgctaaatatgaattcttgcgctaattcgttgatttatgccgccttcaatagtatttctaacactatcgtaaacattccctggggttccctatgacgattcgctttgccgataaagcagactgcgccgcgattaccgaaatctataaccatgcggtattacatactgcggccatctggaatgatcggacggtcgatacggataatcgccttgcctggtatgaggcccgtcaattactgggctatccggtgctggtaagcgaagaaaatggcgtggtgactggctatgcatcatttggcgattggcgcagtttcgacggttttcgctataccgtcgagcactcggtttatgttcatccggcgcaccaggggaaaggactggggcgaaagctgctcagcagactgatcgacgaagcccgacgctgcggcaagcatgtgatggtggccggtattgagtcacagaatgccgcctcgatacgcctacatcattcgctgggatttaccgtcaccgcgcaaatgccgcaggtcggcgtaaaatttggccgttggttagatcttacgtttatgcagctccagcttgatgaacacgccgcgccggacgcctgctgatgaaccagtcgctgacgctcatctttttgatcgccgccggtgtcgggctggtggtacaaaacagtattatggtgcgtattacgcagacatcatcgacgattctgatcgctatgctgttgaactcgctggtagggatcgttttatttgtgacgatattgtggtttaagcaaggcgctacgggcttcggcgagctggtcgccagcgttcgctggtggacattgatccccggtctgctggggtcattttttgtatttgccagcattagcgggtatcagaacgttggcgccgcgacgactatcgcggtactggtcgccagccagttaatcggcggactggcgctggatatcgcgcgtagccacggcgtcacgttacgcgcaatggtcgggccggcgtttggcgcgctgttgctggtcattggcgcatggctgattgcgaagcgccagttttaatgggttacaggatcgtgccgcctttggtgagctgctcgcggcgcgcgtcccgatcttcttgatattgcctgccgtgatgcgcgatagccgtgcgtaaacgctgctgctgcacataacgatcttcgcgacgtaattcagcgtcatcgctcaaggcaatcagcaattcattcatatgggcaattacgctctccgcgatggcggcatccacgcgggcgctcacttcctccaggtgcgacataagctctcctactctttattctgtaacagcatgattcgcctattatacgcgttattgtcgcccgatgcggtaattcgccgccgccaccctgatttaacttacgtcaagtggaaacacggggcttaatagaccgagaattcgcgcctttttgcctttcttccgccgtttgcttgcgtatagaccccgtaaagtagacgcgtgaagaagtctaagggataacaacgtggcaaaatctctcttgcgcagcggcaatctggatgattatcaggccgtgggcggcggcggtcaggccgtatttgaatcagcattgcaaattcgcgaaacgcttcgtctgcgtaaacagcaggcgatggttgactgtctggcgattccgcaacttaacgataatggcgatcgggttgactggtattcgccgattgaaggtcaggcgatagcgtggaaagcggctgacgaagagacacgttctcgggctttacgttatttagccagcacttttgaaagcgcggctgcactcagtcgcaaaagtctgcaatccggtaaaacagcgctccagctatttggttcgctacttgagaaagcgacgcaatttcccggtgaaaatcatgttttcctggttaacggcaaaccggttatcaccttctggggattcgttaatctcaacgaaaatacacgcgatgatgtgctggactgcctgcgggtaaccgaggcaatccccgacatccctctggtcgagccggagcccgaagaaaagccgctggtagaggcggcatttagtcaggcggatgaacctttgttaacgtctgtcattgagccgccgaaaatgccggaggaacctgctgcgccgcccgttatcgttagcgagccgaagcctgccgcacctatcccggttgctgaggcgaaaagagctcgtcgtctaccgctgtggagcttacctgtcgctgccgtggttatcgccgccgtcgccacgccttttttctggccatcttcatccgttgacggggcctctcctgttcgcgccgcgcctgtcgctaccgcgaaaactgacgttacccccttgcctgaactcaccgcgcatttgccgctgcatcgcgctgaggtgacgcccgcccccaaagcggcgccgttgccggaagcgcctgttatcattgccgctatccccaaagacgcgctggtgatggacaatacgcagatgaagcttggaaccacgcgctttttaaacggtagctggcgcatcagtgtggatgtcaaagatccgattaccggcaagccgccctctctgcgttatcagatccaaaataacaaaggcatcgcgcgcgtagtacatggcgataacgtggtttgtcgggcggaaattttctctggtctgcatcaaacgggcgagctgatgattaaaagtcgcggcaatgcgcgctgcaccgacggttcacgttatccgatgccggaaattacctgtaaagcaggcgtcaatgacgtcgcaacctgtaccgcccgttatggcgaccacgcggcaattccgttgacgtttaaaaagataggtgcctgattttatgttggtcaatctgtgtgattacaaacagagcgtcacgctcattgcaaacagcggcgtccagtttcttgattttggcttaacgccgcaagagtcggcccactacggacgttttgtgcgcaaaacggcaaacggcccgctactgcgcctcgattttgatctggccagcgggcgctacacgttgccaggacgtgctggcggccaacccgaagtcgtgaaaccggaaagcactcagacgctgcactattctctggatgtactcgacggaatctggctccccctgccgttcctgcgttttaatccgccgcgtacctttattgacgggccggataactgggcgcgcattcaggtacgtaaactcagcgagccagatagcgccggaaacacacaccgcatcaccctcgccttcgacagtcagctggcaaaaaatatgcctgcggcgttggcgccttgcgaaaacgatctgctcaatggcacacgttttgcgctcgcctggcgcgatgaagaagttgccgattttcttgaccagacatggattgacggctggctgcgcgagtcgtttcttcagtatgcctcacaggtggaaaaccgttcggaacaggccattcagcaagcgctgcgtagttttgagtatcaggcgcactggttgaatttactgacgctgttaggcgaacagcttacggtgccggaagtgaagtttgtgacacatacgttaagcacgcccgcaatcccggtcgatctgattctggatgtcggcaatacgcatacctgcggcgtcttgatcgaggatcatggcgatgcgaatgacgggttacgccagacggcagagcttcaggtgcgttctttaagcgagccgcagtatctgaacgatcctttatttaccagccgggtagaattctcggaagcacgctttggcaagcaacacttttctgtcgaaagcggacgagacgacgcctttgtctggccttccattgtgcgtgtgggcgacgaggctcgcgcccttgctatgcagcgtgtgggcaccgaaggcagcagcggtatctccagcccacgtcgctacctgtgggatgaaacccccgccttgcaggactggcgttttagccagatccacggtaaaacgcagcgcgaaccgcttgccaccgcgtttccgctgatgaatctgatgaacgatgacggacagccgttattccgcctgccgtatgaagaaaggctaccggttttttcgccgcaatacagccgtagcaccttgatgacgcatatgttgtgcgaaattctggctcaggcgctggggcaaattaacagcgtcgccacccggctgcggctcggctttcccgcctcgccgcgccagctacgcaccctgattttaacgctgccttccgccatgccgaaacaggagcgagaaattttccgccagcgaatgtttgaagcgctggcgctggtctggaaagccatgggctggcatccgcaggatgaggatttcaccacgcctaagcagcgtgaaaaaagcgtggtgccggtaccagaaatacagatggaatgggacgaagcaagttgcggccaactggtatggctttataacgaagccatttcgcattacgccgggcgtaccgaatccttttttaatgcgctggccagaccggatcgccagcctgaacccggcgtcgtccccgggcgcgcgttgcgcgtggcatcgattgatatcggcggcggcacgacggatatggcgatcgttcactatcagttagatgacggcgtgggggccaatgtaaaaattacgcctcatctcctgtttcgcgaaggttttaaagtcgccggggacgatctgctattagatatcattcagcgttgcgtactcccttccctgcaaacggcgttgcaacgggcaggcgttacggatgccgccgccctgctggcgaccttatttggcgattcgggacgaattgatactcaggccattttgcgccagcaaacggcgctgcaattatttatgccgctgggccatgcggtactttccgcctgggagcaaagcgacattaacgatccgtttgccggtttacatgcgacatttggcgatctgctgatccgccgcccaacgagcaacgtgatgaactatatccagcaggcgatcgatcatgccttaccgtctggttcgccgacatttgatatattcaatgtgccgttgcaaatccagtttagccagcttcaggagtctctgctggccggtcagtttacgctgacaacgccgcttcatgcggtctgcgaagcgatatcccactatcactgcgatatcttgctggtgacggggagaccgacctgtttacccggcgtacaggcgctcatccggcacttacaaccggtgccggttaatcgcattgtgtggatggataagtatcaggtacatgaatggtatcccttcagtcaacaagggcgtatcggtaatccaaaatccactgccgcggtgggcgcgatgttatgcagcctggcgctggacttacgtctgccgcgtttcaattttaaagcggctgatatcggcgcgtattcgactgtacgttatctcggcgtactggataataccgttaatacccttcgcgatgaaaacatctggtatcacgaaatcgatttggataaacccggcgcaacgctggacgctcgcttgcattttccgctacgcggtaacgtgacgttgggctttcgtcaactggcgaacagtcgctggccagcaacaccactttattgcctgagcattaattccgccgaactggcgaaaaccatcgctggcgacggcgtactgaatgtgcgactgaaattacgcggcagtagcaaagatagcgccccggaatcgttcatattaagtgatgcctggctccaggacgggacgccggtcgccgccgatgcgctgacattaaaattgaatacgctggctgaccgtcgccacagcggcagccactactggatagatagtgggagtgtatacctgaaatgacaaaaccgttaaacaccacccaggctgttatcgagtgggttaacaacacgcgccgttacgcaacgcgactggatgacgaagccgacgctctgctggcgcaacttacgcttgccgcggcggatgagtcagcgctcaacgccgcctgcgcatcacatggctgcgttggtctgtacgggtatgcgcaatccgcaaaagcgcatctgttaacgacgctatgcggtaacgagaatggcaagctggaaattatcacgccggaccgtgactatgattatttcagccacatcaatccgggtcatgcgccagcgaatatggctattcgctttacgcgcgacattttttcaaacgagagcggctggccgttgcgcctgcgcttgatcagtgaagccgaactggtgcagatctttattgcctggaccagctcgtcccccgtttgtcgccaggtcgaaaaatccattatcacatcacgcctggagaaatggcaatcgcttcgccaaccgcagcccgtccccggcgttaccgctgaagaggtagcgaccatcgcgagtttctggcgctcttgcctgccgtccgccagacaacatattgatgatgcgacatggcaacactttgcctcgctcttgcctgcgctggatctcacgacacgggcgcacgcctgggcattactgtggggagagcaaccggagatcacccagcaatggctggcgctggcgcatatgttgcaacaaaccggccatgccggggaactggcggcgccgctcagcctgctggtcgatcattttggcttaccggcggaaaacttcctgacgcaaatggcgctaaccgccaacgatacgcaaagcgatgtggtggtgcatccggttaaggaaggccgactgctcaatgcggtcagcctttcgcttgattctctggcgctgcttacccgcgaactggtgctaagcgttgaaaacaacgtactggataacgtagatttactggatattccggtcgcgccagacagtcatcctcatccgttatggcgggcgaaattaggttggatgctggcccattaccgccaacaggtacagcccgatgttctggtgatttgcaatgctctggcatctcgctcgcaaacgtccactgccgcccatcacttactggagtgggttaacgccacgcagccgcagcatgaatcagcgttacccggcgtcgtctgggctattactccacaggatgcccgttttgccacccagcaaaatctggatgaagccgtccagcagttgatgggtaaacctggcgtgcattggggaacgttgcaggcgctggataaacacagtatgcagcgtttggtggaatggttatcgcaggcgacatcggcaccacagcgacaggcgcgcttacaggcgttacgcgaacaactgcgaggccgcgtgcgcgatctgttaccgatgtttgatgacgcgcggctaccggttgaaaccgtgatccggcgtcttcaggcccaggccgccagacatggcgacctgctggccgggctgttaccgccggtacagaacttcgaagcgttgctgagcacccgacagtcacgagaagaacaggtctgcggtttatttaatgacgcgatcgatctctttgccgacgaaccaacgcgcgcttcagcgtcagaaggtcacgaaacaggctaccaggcgcacaaaatgtggatcaatcatctgcgccagtgggcccactgccgggataatgcgcagcgtctgggactggaaccgcagatgctcaacgccgtggcggagattttaattaccgccagctatcgcctcggtttacctcagcagttacagaaaaccatgcagcgcgaggaggtgagcggcgcgcagcttcatgccatcattggtaacttcatcgcctggctcggctacgccaatatcgaggaggcccaacgcccggccagccgcgttcagaaaggcgcagccattttcgccgcaacaccgcgttcgacaatgttgcgtctaacaaagcttgacgaacagcccgttcatgccgccagccgctatgtctatgactggcttgttgcgctgtataccctggccaatgagaacgcaggatatcggcatccgcaggacgttaccgacgtagacagagcgcaattaattgccctgatagcctgacctggcggaaaaaccatgcccggtaacctgtatcgggcttgaggtcagaaaagcgaaaacagcaatgcgacggggaaacttatcggccatgtcgcgccaaccaaaaaggcgctcaggaaacgaattcgttttttgtcatgagtcaaaaaccaggtgatcagggatgatatcaccgccatgacggcgtaaaaaattaatatcttttgaaagagggtcatatcaggcatccacgccaaccagaggaaaaaacgcgcgcaatatgctctttttatttgacgcacatcaaggtttatcagccttaacagcaaaacgttctcaatgcacggctccgctcacagaatatcctgtttaggtattattgcggatctcgccaacccgtactatacccataggggttatgatgaaaggtggcgaaaatgaatgtttccagtaaaaccgtcgtgctgattaatgtctttgctgctgcaggacttttgggtctgatctcgttgagattcggctggtttgcttgaggtgttcaacctttgagtacttgctgcgcatgttggcggggaggtccccctctccgccgacacccgcctattttttcacgatttttctgaacagtaaatgatccttaatgcttaaccatgatgtggcggacaagggtgtagtcttccagaccatacaatgacatatctttgccgtatcccgactgtttttgccctccatgcggcatttcgctaaccaacatgaaatgggtattaatccaggtacagccatactgcaatctggcgctaagccggtgcgcccgcccgacgtcctgagtccagacggaggatgccagaccatagcgagaatcgttggcccacctcagaacctgatcttcatcatcaaagacggttatactgaccaccgggccgaagacctcgcgttgcacgatggcatcttcctgttttgcgtctgccagcaacgtcggagcgaaatagtaacctttaccttccgtttgacttccgccagtaatcacacggatatggctgagggccttcgcctcctctacagccgctgtgacgcgcttcaggtgcgccagcgaacttaacggccccagctctgtcgactcatcctccggcgcgcccattttcaggctgctcactgcgttccctagcttttcgaccagcgcatcatagataccgcgctgcgcgtatatacggcacgccgcagtacaatcctgtccggcattatagaaaccaaaagtccggacgccctgcgccaccgcatccagatcggcgtcatcaaaaacaatcaccggggctttaccaccgagttccatatgcgtacgttttatcgctggcgcagtatggcgcagaatatgctccccggtcgcgatagaaccggttaaagagaccatgcgtactttttcatggccggtcaatacatcgccaacagtttgccctcgtccgaacaggacattgagcacccccggcggaaagatatccttcgccagcacggcaagtttaagcgccgtcagcggcgtgatttcagaaggcttaatcaccacgcagttacctgccgccagcgctggcgccagcttccaggccgccatcatgagcggataattccacggcgcgatagaggcaaccacgccaatcggatcccggcggatcatcgacgtatgtccttccagatattcgcccgccgccagcccactcaaacaacgggccgcgccggcaaaaaagcgaaagacatccacgattgccggaatttcatcattaattacgcagtgcaaaggcttaccgcagttttgcgattcaagccgggcgaactcaagggcgttttgctcgatgctgtccgccagttttaacagacattccgcccgtgctttgggtgtggtctgcccccattcggcaaacgcgttatcggcggcctgcactgcggcgtcaacctgcgcgggcgacgcttccgcaatctcaagtatgacctcgcctgtcgccgggttataaacagactgcctttctccctcgccgtccaccagcacgccattaatcagtaattgatattgcatagcattttcccatatcgtcattaatcgatttccggcgaacgggccgccgctttcctaaaaatagacggcgcgccagatgctcacccggcacactcgggaaatttagtcaggttgtgagctgacacgcattccacctcacacaaggcttttagcgctcagcatctcgcgaatcaggctgccaagctgttttacggcctgttcttcccgttctccccaatgccatgcggtgttaaaacgaaagaaacgcgtccaggcgccggacgttgaaaacattttccccggcgcgatactgataaggtgttcaagcgctttggcgctaagttcaccggcatcaagctgctcaggtagctccagccaaagaaaataaccgctatcgttatggtgaatttttacttccgccgggagatggcgcaaaagggtttgccaggcttgctgtttacgttcggcaagctgccttcgcaatcgtcgcagatgcgcgtcatatcgacgtgtcgagagataatccactaacgccaattgcatgggggaactggtggataatgtgctcattaactgcaaacgctgaatttgtctggcatggcttcctcccgcaacccagccaatgcgaaaaccgggaaccagacatttggaaaaagacgaacaatgcaacacggtatcgtcgcgatcccatgctttggcaggcagaggtttctcgcggccaaagtagagttcgctataaacatcgtcttcaattagcgtcacgttatggtgcgtgagtaacgcaaccagccgcgcttttttctcagcactcagcgtgaaccctaacggattctggctgttggtcattaaccagcacgctttcaccggatattcctgtaacgcctgttccagcgccataagatcgataccttctttaacatcggtaggtatcgacaacgctttcaggcgcaatcgctccagggcctgtagcgcaccgtagaaacaggggttctccaccaccacccagtctcccggcgccgtcaccgcctgtaaactaagattcaacgcttccagcgcgccggcggtaatgacaatctcgtcaggagaaacggtaatcccctgctgcgcgtaacggcgtgctatcgcatagcgcaattctgcattacctggcggcaagttttcgatgacgctcattgccgtcgcggttttgctgacctgcgccagagagcggttcaattgcggcaagggaaacagacgcggatcgggaaacgctgaggcaaagggcaccacagaggtatcacggctcgcctgcagcatctcaaaaatataggtattgatatctacggcttcatcccgaataacgtgcgctgccgtcgcgactgaccgacaaaccggatgcggcgcgacataataaccagattgcggacgggcgataatccgtccctgactttccagcaactggtacgcatgaccgacagtcataaaactcatgccgctactggcgacctgctccctcagcgagggtaatcgatcgccgggttgccaaacgccagaggcgatttgttctctaatttgctccgccagacgttgatattttttcattattcgatctcattgagcgctgcttgcaggtggcaaccgcagtgtatatcagttgttaaaattaacaatgatttgctaactgttatggtgctttccaacaggcgtaatgattagatttcgcaacaaaacgccgtttcagggtctctgcttaacgggaaagtcaaaccaagtgttcgggtatggttcatgagtaagagagaagtgccaccattcagtatccagtggcgtaaaacccgcatcacgcatcaatgtttgtaataacaacctatttgcgcgttgctgagcggtaagtatgacattatcgggatgggataacggactaaaacagtcaaagccggtaccaaaatccagactattatctggcgagcgttgcgccgcggacgcagtacaattcaccagtggtcgtccgggatcgtatattggtattttactgtcaagtggaacaatcgttagatcaagcgtacttccccgactgtggccggatctggcggcaagataaccttcctcaaacagacgatttttctctacctgcggataaaattcgtttttcatttggttttgagaaggatctttggcccacgcgataaagtcgttcactgcgctttgcggacggtagcaatcatatatttttaaggtaagtccgaaggggcgtaaacgatcggcgacctgcttcactgcgttcgcggctggtcgtgttaacaggcaaacaggcgcgttatagcctttaatggggcgaccaataaagttatgggaactgaagtatcgcatgtctacctgtacgtcgggggcgaccgtagtaatatcgacaaagtcttttggctggtggagatcaatatggttttcagctgacattgcctgaacggacaacaggctgaacaggaggaaagaagatacgcattttaccatatgttacacctcgcgagagtcacaggggtgattatgtatttgagcaggtaaagattagcggacaccgcttaaacagatggttaaaataaacatctttccccctgtaatctgtgccttatcacaaacggagagtttatattttgcttatacgaccactgcgcctcctgttctatacccaaaataattcgagttgcgtaaaggcggcaagggagtgagtctcaggagcacagataacgatgtgttttcacaaaggcgagtctacctgaccagaaaggtcatttgataatcagtagtacagttgttgtcgccttccataactaaataacattgtttcgccaaagataagaccactatatagtcaggaaggcaattagtgaggaacacgtcgattgtcggcgataatgcactgaaattacgattcactgcagttgtgcaaacacatagaatccccctcgaaccgagataattcggtctgctggtcatagccattattcagtaagaccgcaggttgcagcggcggatcacgggcgtgaagaaacatcctgtgccccaaattttttggacaagcgctgaacctgccgtatacttttacttaacgtacactccgccataaaaataaaccctgcgatgataccgtaatgccataggcataacttaaggatatgccataaatcaagcgaagcatgatttaacttctcagtaattgcgatagtctgtacaaatattatgggatgaaataataagatgcctaacaaaaatatccctgccacgatcatggcaagtaactgaaaaaaagcccatccgataacgaaacggtaaagtaacagcaataatagccgtccacatttccttagccattctgactgcaaaatgccccaggatgctgtcttttcgtgaatttcaccatctgatttcttcattttgagcctcctcgcaggtttttataattttatcgcccaactggaaacaaagccgtcagctaatcgttacaacaaatataattaagacaaaaactaaagagtaagatatttatatcataagcactatcagtattggccttctgccctaccgctaaacatctcattgttgttagcctaataatacttttagtttaacttcttataagacaatttctacacggttgagcaactatttactttctctaaaaataatatagtgcgtaattaatcattactcatagtacatgatgatgtgagaattaagaaaaccgttttactttcattcgttttatctgacatatttcatggccaggaggcgtgggcatgactaaagctacgggtcgatttgaacaattgaacaataatgttgacggttcaggacaaagcaaaaatcaggtgtttcaccgataggcaaaccgatgggcaacatgggataatatttcgaataccacctattccagtaatgaagtatcatataatcacttgtggtctacattatgccaattactatcgggagaggatttttaaagagtgagatgttttctcaaagtgctatctctcaacgctctttctttacgttactatgggaaaagattaaagattttttttgtgacacgcaaagatccactgccgatcaatatataaaggaattatgtgatgttgcctctccgcctgacgcgcaacgtttatttgatttattttgcaagttatatgaattatcatcaccgtcatgcagaggaaatttccattttcagcactataaagatgctgagtgtcagtatacaaatctctgtattaaagatggcgaagatattccgttatgtattatgatacgtcaggatcactactattatgagataatgaatagaacagtgctctgtgttgatactcagtctgcccacctgaaaagatattctgatattaatataaaagctagcacttatgtttgtgaaccgctatgttgcttgttccctgagcggttacaactctcgctatccggcggtataacattttccgttgacctaaaaaatatagaagagacgcttatcgccatggcagaaaagggtaatttatgtgactggaaggaacaggaaagaaaagccgccatctcctccaggattaatctgggcatcgcccaggcaggtgtaacagctattgacgacgctatcaaaaacaaaatagccgcaaaggttattgagaatactaacttaaagaatgcagcgtttgaaccaaattatgcacaaagctcagttactcaaattgtttattcatgtttgtttaagaatgagatactaatgaatatgctggaagaaagttcctctcatggcctgctatgtttaaacgagcttactgaatatgtagcgctacaagttcataacagccttttttctgaagatttatcttcactcgttgaaacaacaaaaaatgaggctcatcaccagagttgatcacaccataaatagtatggatttacaatcccctggcaataccaaaaccatctaatacaataactttaaatatatactcccagggaataatggatttactatggaacgaattggctcgttatttttataattgacatactgagtataagtatattttctcatacaacttatcgcacttattgacaaaccgttttcgctaatttgaagtgtggaataataactcaaagaaattattggcatcatagcctcacgacgtaactggaaggtggcatgatgcttacaaaaacgttatcagtagttttactgacctgtgcgctgttttcaggccagttactggcgaaacagcaagaccacgcattcgtatggtttgcgacgggagggcaccagcttagacacgaagccgacagcgatgaattacgggcggcagcggaagaatccgcggaaggcttgcgcgagcaccacaactggcagaaatcgcgcaaaccagaaagctattttcgttaattaaacgcccctgcgcttcggcagcgttttcatcagcgcttcagggctcactgaagcgacaacgctgccgggctggggcatttttaagatgtggtttttaattttgccaatgacatgcatttcgcaagggcggcagtcgaattttagcgtcagtacctcatcgccatgcaccaactgcatcggcgtggctttccagctcttaatatttcctttcgcctgctttggacaaaggttgaacgcaaaacgcaggcagtgtttggtgatcatgaccggtacctcgcccttctcctgatgcgcctcataggccgcatcaatcaattgtacgccgtaacggtgataaaattcccgcgctttgtggttgtagacattagcgagaaagctgagatgcgtttgcgggtagaccggcgcaggctgcgccacgggtttccgacgacctcgttgataatgggccagccgcgccgcgtcaagcatatcaatcgcctcccgacggaactgattgagcaggctatttggcacgaacaacgccgccggtaatgtcacctgcatatcacgcgcgtagtaaggcgtctgtcccagcttcgccagtccggcttttaggttattcaacgctttttcagagttgttggcttcctcaaataccccatcaagcgtatgcgtgatgcagacaccgtcttcactggtcagcgtcagaataagctgttcctgccagccgcccagcatgatatcaaccgccacacggcgctcactggaggtttttgtcagcgcttgctgccagttatgatccagattacgattcaacggatgatgcggacggactttatgcaggtcggcaggcatatcatttggccaaacgcggtagcggttatgaccggttttctccaccgtattggcgcgaaaacctaccacttcacgcttaatcaacacgttcagaccatcgccattcgccaacggctccgtagcttctacgtcgagataatccttcgccacattcagcacctcacctaccggcaagccaataaattttggtgaatcaaatgcgccaatatcacctttacgcgcgttaacaaaatagtcggtgctgccgcgatggaaggttttctccgtggagggaacaaaaaagtgttcggtccgaccaaccgacgcacgcgccagatcgccacgttgctcgataatcgcgtccagcatctgacgataatgcgcggtgatgtttttgacatagctcatgtctttatagcgcccttcaatcttgaaggaacgtacgcctgcatcgatcaacgcgccgaggttagccgtttggtcgttatctttcatcgatagcaaatgtttttcgtaagagaccacccgcccctgatcgtcttttaacgtatacggtaaacgacaggcctgcgaacagtcgccccgattggcgctgcgcccggtttgcgcatgagagatataacactgcccagaataagcgacacacagcgcgccatgaatgaagaactcaattgtggcgtcagtagcctgatgaatagccgctatctgactcaaattaagttcgcgcgccagtacaatctgtgaaaaaccgacatcggcaagaaacttcgctttttccacgctgcgaatatcacactgtgtactggcgtgaagctcaatcggcgggatatccagttccagaatgcccatatcctgcacaatcagcgcatccaccccggtgttgtacaaatcggtgattaaccgctgcgcgggctccagctcatcatcatgcagaatagtattcagcgtgacaaaaatcctggcgccgtaacggtgagcaaacggaaccagatcggcgatatcgcgcagactgttactggcgttatgacgtgcgccaaaaccgggtccgccgatgtagacggcatctgcgccatgcaaaatcgcttcgcgagcaattgcggcgtcacgggccggacttaacaattcgagatagtgaggttgctggcgcatacagtcgttcttatccaatagaagcgaaatggcggctattgtagtcagaagcgcaaactaacgaaatagttttcccgcttaatcacgtgggtaatggatcagcgagtgaaaatgaaccgtctggtcactgctgttgcgataggtatgcgccgtatcgccggcaaaacgcaaacctttaccggcgtctatggtttgccataccccaccagtacacatgtccagccgaccctgaatcaccaccacatgttcgataacgccggctttatgcggcgttgattcgctgaccgtgccaggcgccagcaatagggaaaaatagtcaaaacagagttcaggatcccatggaaacaacggtgtgattaccatcgcttgctgctggggatcgaaggtcggaggaaattcggcctgcggcggcgaaataaacactgagaatggaacgttcaggcccgtcgcaattttccacagcgttgcgactgtcggactggattcattacgctctatctgccccaacatggcttttgagacgccggagatctccgccagacgcgataaactccagcctcgctgatggcgtaacgttcttaacgtggtcgccagatagtgtgtcaggttatccattttcccccctgtaaggccatagcgtatcacttgtacgctataacgcacaatgctacattgactgaccgttataacgcacaagaggcgatcatgcgtctgttatcactgccgttacctactgtattatctggtctggtcgccgttctggtcggctatgcgagttccgccgccattatctggcaggcggcgcttgccgctggcgcaacacccgcagagatcgccggctggatgaccgccctcggtatagccatgggcataagcacactaacgttaaccttgtggtatcgtgcgccggttttaaccgcctggtcaacgcctggcgccgctctgttggtaacagggcttcagggattatcgttgccagacgccgtgggcatattcattgtcgccaatgccctgattgtgctgtgcggcgtcacgggattgtttgcgcgtttgatgcggataatcccccattctcttgccgccgcaatgctggcgggaatactgctacgcttcggcctgcaggcgttcgggacgctcaacggagagtttgtcatgtgcggcggtatgctattggcgtggctactctttaaagtattcgcgccccgctatgccgttattgctgccatggtaatgggaataacggtggcgctcatccagggtaaggtggcgatgagcggtattcatttcgcgccggtgtggcccaccttcgttcccccccacttttcattcgctcaaagcctgagcgtcgcggtaccgctcttcctggtgacgatggcatcgcaaaacgcccccggcgtcgccacaatgaaggcgtctggctatcagcttcctgtctctccgttaatgatttttaccgggttgctggcgctgctgctttcgccatttggcgtttattctatctgcattgccgccattacagccgccatttgtcaaagcccggacgcgcaccccgatccaacgcgtcgctggttagcggccgccgccgcaggcgttttttatttacttgccgggtggtttggcggttcgataaccgcgctgatggtcgccctgccggttagctgggtgcaaatgctggctggtctggcactgttaagtacgattagcggtagcctgtatcaggcgcttactcacgaaagtgagcgtgacgcggcagttatcgcatttctcgtcaccgccagcgggctaacgctgatgggcatcggatcggcattctgggggttgatcgctggcggaataggctacgcagtattaacgagaacgcgccgcccatcgttgtctggctgatggtggccgctaatctgccggggtttgcgccatcttgcgatggcgccgcagaattattttttattaacgtcaaacatagaggtatccgtcgccatatcatccacgacctgtttcaacgtctcaaacgccattggcgtactggaattgctcaggtctttaccttcaccctggcgtactaccttgacgaccggcttgttggtcgcggcatctatcagctcaccttcaaaatagaggtgggtatccatggtccggtggcccgtcgccatttgcgtgcccgccacaatcagcgctacagggatcacctcatagaattgcagcccttctttgctggtatccacgcccgtaatcgccccgcggaaaatcaaactgcgcggccctggcgtcgtgaccagcggtttgcgctgttcaattgctgattttactttagtgttcgtataagccagcagtttatcaagaacttgctgcccgacctgggtcgttggtttggggacgggatagtatgttatcggattgtaaacaatactgtcatagttagagtcattgaaatgtggatctacccagcgcaacaccggtttccccgtggcggaggtagtttcctgcaggtccgaataattttttaagaatccagaatacttatccggctgtgtgactttagacgcacagccggataacgccagcaagccagtaagcactgcaactttaaataaagtatgagtacgcatgaaacgatccctttagtcttcgcaatgatgcaaaggaaataatagcaaaacgaaatcattctggatgcactaaaaatggtaacgacagcacaatttgaacgcggcgcccgacaaaaaaatgccgaacgcagcgagacttacagaacttgcatcgctcaggccgtttttctcgccagcatcgtagcaaagcgcagtttgatacggttgccattttcgtccgtgcggtgaagctcgccgacatcttcgttgtatttcagcatgtcccatccttcgtaatagcggcgtaattcgccttctttaaaagcgaacgggaatcccaccgtacagggaaagtccggcgtatccattgccgcaacaatcaaattatacccgccgggttttgtgcagcgttgcatattggcaattaaaccgggaatggtttgcgcctcaagaaacatcataaccaccgtcgagagaataaaatcgtattcgccgtcaaaggtcaatgtattcagatcgacaaggtcggtttgcagattatccagcccttctgccgctttaatacgctcaaggttagccatactggccggatttttatcccacgcggtaacgtcataaccgttcgcggccagatacagactattacggccattgccacatcctaaatccagcgttcggcctggcgcgacaacctttgccgccgccagcacatccgaatgcgtgcgggttaaaccgtatttctcagtaaagtaattttcgtcacgaacggtcatttttttcctccgttttcaacagtgcagcgcgctcagtgcgaataagcaacgtcccctgcaccagcaatagaaatgtacgaaccagcaataaagcgataatagcgttagtgaaaataaacagcgggacggccagaatatggaaaagccctgattcactaccgtgaccaagatgtaaccccgtggtcgccagcgcggaaacgccgaacgaaaaactccagaaggaagcattaaacggttgtgataaataccagggcattaatcgcagcataaataaaagctgtaacagaccgtagccgaatagcattttcgccagcgtgtcgccctccccgccattgacgctcagccaggcgctacaggcgaccagcgcgggcgccagttggatacccagcgacgtacgcagcaccgccggtaattcgccgcagctacgcagtcgctgcaaaataaccggctccagacttaaccacgaaaagacgcctgcgcctaaaaacaccagtccggcatcattgtaaccgagcgctccacaggccatagcgctgataaaattattcgctaccgtgggcagataaagtcctggggttgtcgcttcttccggatgcgctccgcgccaaagtcccgccgtctgccaggcggcatacgccagttgtatgacgacccccacgctgaatagcgcaacggccaacgggcgataccagggaacgaaaccgatcgcgaccagcatcgtggtggcgggaaacaggctgacaaaactgctcattaccggatgtcgcacttcagccatcacgctatggggaaagcgcaccagacggctaaggaacgccagggtcaagagtgcccaaataatcatcgccaggatcaccatgatgtcgccgggccagtggcttattccccatatctggctggcataacgccaggcgaatcccataccgatagtgccaaggacgatgccaaaatagcccgcaggcagattgagcacgcgatcgctctgcttgtgattacgcattttgtttaatttataaagtatatttgaaatgcattttatggaatttctggttgtttcgccagtacctttgctacggttatcttaatcgttcacacggaatttccctatgaccaaatatcgactgagtgaagaacctcgtgcttttacttatcaggtagacggtgagaagaaaagcgtcttattacgacaagttattgccgtaacggattttaacgatgttaaagccggaacctccggcggctgggttgatgccggtaatgtgctgtcacaacagggggattgctggatttatgatgaaaacgcgatggcctttgcgggcacggaaattacgggtaacgcgcgtatcacgcagccgtgctcgctctacaataacgtgcgaataggcgataacgtctggattgatcgctctgatatcagcgatggcgcgcggataagtgacaacgtcaccattcagtcctcttccgtgcgcggagagtgtgcgatttatggcgatgcccgcgtgttaaaccagtcagaaattctcgccgttcagggactaacgcatgaacatgcgcagattttacaaatttacgatcgcgccaccgtgaaccattcgcggattgtccatcaggtacagctttatggcgacgccactatcactctcgcttttattgagcaccgggcggaggtctttgatttcgcgctcatcgaaggcaacaaagacaataatgtctggatctgtgactgcgccaaagtctatggccatgcgcgggttatcgccggcacagaggaagatgctatccctacccttcgctacagctcgcaggtagcggaacatgcgttaatcgaaggcaactgtgtgttaaaacatcatgtgctggtaggcggacatgctgagatacgcggaggcccgattttactggacgaccgcgtgctgattgaaggccaggcctgtatacagggcgaaattctgattgagcaccaggtcgagattagcggacgggcgacggttatagcctttgacggcaatactattcacctgcgcggcccaaaagtgatcaatggcgaggatcgtattacgcgtacccccttagtcggttccctttaatccgcatcaataatgcgggcatacatattaacgtcgtgatagtcgccgttaagatactccgcctgcttcatacagccctccagcgtaaaatggttgcgccgtgcgactgcgttactggcctgattatcaacgcggcatttaatgacgaagcgccgaatatcgccgcgccgggcataatgtgtcatcagcgcctgtaatgattgcgacattatcccttgtccctggaaggactcatccagccagtaaccgatataggcggctttgtttatcggttcgatggcattaaatgagagtacgcctgccatctcattctggcagaaaatcaggtacattttggcgtaaccacgctggtgcaacagtatattaccctgcacatgcttacgcgtttcctcctgcgacgtgacatattgcggccagtcgagcgactgttgtagccacgctttgtttttgagtaccagttggtgcagcgccggaacatgactttcatctgccgctcgcagttccagcgtcgtgctaacaggaataatttccaccatcgcgttgcccttcttcgttgttggtcgtgatcacataaatagcctggtttaccgataacccgcaggtgatatgagcgtttttattgtatcgccatcacattattttttattggccatatttagcgtatttccgcgtgacacatttcacacttatccaaccattctccgcctataaaacgctcaacgactgattgttttatcaccacggagacgccaatgaccttttctgtgcaggaaacgcttttttctttactgcggctaaacgggatttcaggacatgaaaacagtattgcaaacgttatgcagcacgcgtttgaacagcaggccaaagacgtctggcgggatcgcttaggcaatgtcgtcgcccgttatggcagcgataaacccgacgcgcttcgcctgatgatttttgcgcatatggatgaagtgggttttatggtacgcaagatcgaaccctccggttttttacgttttgaacgcgtaggcggcccggcgcaaattactatgcccggttcgattgtgacgcttgccggacgttcaggcgatatcatgggctgtatcggtattaaagcatatcacttcgcgaagggtgacgagcgcacccagccacccgcgctcgataaactctggattgatatcggcgcaaaagataaagcggatgccgaacgaatgggtattcaggtggggacgccagtaaccctttacaacccgccgcactgtctgggcaacgacctggtatgcagtaaggcgctggatgacaggctggggtgtacggcgctactgggcgtcgccgaggccctcgcctccacaccgcttgatatcgcggtattcctggtcgcgtcggtacaggaagagttcaatattcgcggcattattcccgttttacgacgcgtgcgccccgacctggcgattggtattgatatcaccccctcctgcgacacgcctgacctgcaggattactcagatgtgcgggtcaaccacggcgtcggcatcacctgtctgaactatcacggacgcggtacgttggcgggactgattacgccgccgcgtttgctgcggatgctggagaccaccgcgcacgaaaataatattcccgtacagcgtgaagtcgcgccaggcgtcatcaccgaaaccggctacattcaggttgaactggacggtattccctgcgccagtctttctattccctgccgctatacccactcgccagccgaagtcgccagcctgcgcgacctggctgattgtatccgtttactgactgcgctggccaacatgtcgccagaacagtttcccattgagcctgaaacaggcgctacacaagaggcacgaccatgatgaaaaagatccttgtggcatgtggtaccggcatgtcgacatcaaccatgattgcacaaaaactgcaggactttcttgcggagcaaggcattgcggcaaccacggcgcaatgttgtctgaatgagatcccgttgaactgtaacggtatggatctcatcgtaacgtccatgcgtacgcacagtgactatggcatcccgacgctcaacggcgccgccctgctgacaggcatcaacgacgacgcattaaaacaagaaatcaaggcgctgttaacacaataaagggggcattatgtttgattacatcctgtctctcggcggcaccgtttttgtgcccatcattatgattatcatcggcttaatctttcgtattccctggctgcaggcagtgaaagccggggtgacggtcggcatcggttttgtcggcatggggttggtgatcgtcatggcgatcgacagtctcagtccgccgattaaagtgatgattgagcgttttggcctgacgctgcatgtgtttgacgtcggcgccgggcccgcatccggcgtcggctatgcgacggccatcggcgcgatgatcattcccgttatctttctgctcaacgtcggtatgctggtgactcgtctgaccaaaaccatgaacgttgatatttataactactggcactacgccattaccggaacggtcgtccagttgatgaccggcagtctgatttatggcgtactgggcgcgatttgccacgccgccttgtcgttgaaaatggccgactggacggcgaaacgggtacagaacattgtgggtctggaagggatttctattccgcaagggtatggctccagttccgtgccgttgttcgtattgctggatgcgatatacgaaaaaataccgtttatgaaaggacgcaatattgatgctcaggagatccaaaaacggtatgggatggttggcgacccggtgatcattggcgttgttctcgggctgatcttcggacttgccgcaggcgaaggctttaaagggtgcgcaaccttaatgattaccgtggcggcgattatggtgctgtttccgcgcatgattcgccttatcgttgagggattaatgcccatttccgacggcgcgcgtaagttcttccagaaacactttaaagggcgcgaagtctttatcggtctggataccgcagtgacgttaggccacccgaccaccatcgcggttggactgctgttaattcccatcatgttaattctggcgagcatactgccgggcaataaagtcctgccgctggctgatttaccggttgcgccgttttttatctgcatggccacggttattcatcgcggcgatctgattcgtactctgctcagcggcatcattgtcatgattaccgttctgctgatcgccacccagttcgcaccgtactttaccgatatggcgctcaaaggcggctttagcttcgccgctgaaaacgcgcaaattaccgcgctgtcggtgggaaatatgtttggctggtcaatatctgaattgatgtcgctgggcatgattggcgtggttattgtggtcggcattgtcgccagcatcatacttgtcttacgtaaacgtgaactaccggaataaggagcaacccagaatgagttggctaaaagaggtaataggaacagaaaaagccgttatcgccatgtgccatttacgggcgttgccgggcgatcccgggttcgataccaggaaaggcatgaactgggtaattgaccgcgcccatgacgatttaatggcgctacaaaatggcggcgtggatgcggtgatgttctccaacgaatttagtctgccttatttaacgaaagtcagaccggaaacgaccgccgcgatggcaagaatcatcggtcagttaatgagtgaaatccgcgtaccgtttggggtaaacgtgttgtgggaccctgtggcctcgtttgatttggcgatggcgaccgacgcaaaatttatccgcgaaattttcaccggcgcttacgccagcgattttggcgtctgggatacgaatgtcggcgaaaccattcgccatcagcatcgcatcggcgcaggccacgtgaaaacgttgtttaacatcgttccggaagcggcggtgtatctgggaaaccgcgatgtctgttcaattgcgaaatcgaccgtatttaacaataaccccgatgccctgtgcgtctcggggctgacggcgggcgctcgcacggatagcgccatactgaagcgagtaaaagagaccgtccccgacacggtcgtgctggcgaataccggggtgtgtctggaaaacgtcgaggagcagctctgcattgccgacggatgcgtaacggcaaccacgtttaaaaaagacggcgtcttcgccaactttgtcgaccaggcgcgcgtggcgaagtttatggagaaagtacgccatatccgacaataaaatggggataagcaaaacgcttatcccctgcagagagcgataactcttctgccgatctccgtcgccttcgccaaaagacacgccggggatcggttccagagtaacccgaaccggcaaggagtcaacgatcgatgattaatgatgttaagtgggttcaggcgcaacgccatgccagcgactggcgacacgcgctggatatcgccgttcgtccgctgattacgttcggcgcggcggccccctgctacctggacggtattattgagaacacccttaaatgggggccatattatcttatcgcgccggggattgcgctgccccatgccagaccagagcaaggcgccaaccataatcaaatcagcgtcactacgctatcaacgccggtcgctttcggcaatgcggattgcgatcccatctggctgttgctttgcgccagcgccacggatgccgaagcacatattcgcaccattcaacgcatcagccagtggctcgactcgccggaaagcgtcgcgatgttgcaagatgcgccaaatgatgccgcgcttttcgcgcaattaaccgcattgcgctgatggaggttccgatgatcctgcacccttcactggcctccgccgatccgctgcgctatgccgaggcgttgaccgctttacacgatgcgcctctcggctcgctgcatctggatatcgaagataccagtttcatcaataatattaccttcggtatgaaaaccattcaggcggtcgcacaatacactcgccatccgctctcatttcacctgatggtctcatcgccgcaacgctggttaccctggcttgcagctatccgccccggctggattttcattcatgccgaaagcgtgcaaaaccccccggagattctggcggatattcgcgctatcggggcgaaagcaggactggcgcttaacccggcaacgccgctattgccttatcgttatctggcattgcaactggatgcgctgatgatcatgaccagcgaacccgacggacgcggacagcaatttatcgccgcgatgtgtgaaaaagtgagccagggcagagagcatttccctgctgcggaatgctgggcggacggcggtattacacttcgcgccgcacggctgcttgccgccgcaggcgcacagcatctggtgattggccgggcgttattcacgacggcgaactatgatgtgacgttgtcacaattcaccgcgctataaaggagtcatatgctgatgagccaacagcgccccgaccgtatcaaacagatgttgcattacctttggcaacacaggcacctctcaacacagcaagctattgagctttttggctatgcagaggcaaccgtgcgccgggattttcactatattgccagccgttatcccggtatggttcgcggccatggttgtattgacttcgacgacagtacggaagataaagaatatgttttcgacgttaagcgaacgttacaaagcgaggcgaaacgcgaaatcgccgccctcgcccgcacgttcatcaaggatggagactgcttttttctcgactccggctccacctgtctggaactggcaaaatgtctggtcgacgccaaagtaaaagtcatttgcaatgacatcaaaatcgctaatgaactgggtggcttcccacacgtagagagttacattatcggcggactgattcgccccggttacttttcggtgggcgagagtctggcgctggagatgattaacgcctttgccgttgaacgcgcctttatctcctgcgatgcgctgtcgattgaaacgggcatcaccaacgctaccatgtttgaagtgggcgttaaaacgcgcattattcagcgctcacgcgaggtcatattgatggccgatcactcaaagtttgatactgtagaaccccatgcggtggcgacgctgtcctgtattactaccattcttagcgacagtgcgctcccgtctgctatcgcccgacgttatcagcaggcgggatgccgtctcatcatgtcagacccctcatcaggagcgcgttaatggacatcaggcaaatgaacagaacccatctggatcactggcgcggattgcgaaaacagctctggcctggtcacccggatgacgcccatctggcggacggcgaagaaattctgcaagccgatcatctggtatcatttattgcgatggcagacggggtggcgattggctttgcggatgcctcaatccgccacgattatgtcaatggctgtgacagttcgcccgtggttttccttgaaggtatttttgttctcccctcattccgtcaacgcggcgtagcgaaacaattgattgcagcggtgcaacgatggggaacgaataaagggtgtcgggaaatggcctccgatacctcgccggaaaatacaatttcccagaaagttcatcaggcgttaggatttgaggaaacagagcgcgtcattttctaccgaaagcgttgttgagggaaatcatacaggaaaaggtcgggtatagtacccgacctttatattactggggcagatctttttcagttaacaagcgtgtcgttttcacttgttcaatatttctggcgccacccaacatcatgttaattgtcagctctttgtttagctgttcaatcactgatgccacaccctgagcgccgccaagattaagaccgtataatacaggccggccaaccgccacaatatccgccccgctggctaacgctttgaatatgtgcgaaccacggcgtactccactgtcaaaaataacaggcactcgcttgttgacgacttttgcaatcgcaggaagcatatcgaatgaggacggcccgctgtctaattgacggccaccatggttagaaacccatattcctgcggccccggcctggatagcaatttcagcatcctccggcgactgaatgccttttacgataaccggcagaccggaaatacgatgtacataggcaatatcctccggcgtaaaggcttgtttagcctgcgcgtaaatttcacttatccctgctcctttgccagtttttgaaccatcgtcattttttctggcgaacatttccaggtttgcaaagcccaacgggaactggaagttatttttaatatcttcttcccgataaccaccgacaggcgaatctacggtcagaataatcgctttagcgccatgctttaccgcttgtgcaagaataaattcgttaaattgattattcttactcatataaagctggaagaagaacggatttttcccggaaacgttagccacctcttcgatggtcttgttgccataggtgctcaacgagaaaatcgaaccgacctgcgccatgcctttcgccgtcgccaactctccggaggcgtgggccaggccctgcgccgccatcggtgcctggattataggcgttttaagcggaatacccagtagctgcgttgataaatcgatctcttttaactcaatgccctgtaatacgcgcggcataatatattttttgtcaaagctttcggtgttgctgcgaaggttattctcatcttcggctccaccgcgaatataaccaaatgcccctttctccattttggcctgaacgcgcgcttccagggaggctacgttcgtcatttttattgctttttcgtccgtactggctttgtactcttcagcataagccaggcctgatgttgccaacattgccagcgaggccactacccgaatgaggtgatgagttttcatcattattccctttattgcttaaccgcttctgcctggatttttatatcgacaactttcgtcatccccatatcgaccagataatctatcccccactgggtgcgatctatttgcgtgacaaaatcaccaccgcaaacctgcgccttgaatatcgggctcatataacagccaaacttggtggtggttaaggtgacgggcttcgttactcccttcattgttagcaaaccgtcaatagaaaccggtttattatcttcaaaatgccattttgttgatttaaataccatttctggatatttttccgcatccagaatatcgctactgcggatatggttatcaaacgcatccaccccggtatttaaggcgcttacgggaatcgtcacacgcatctctgcgacttgcttttccggctgatatttcagttcgccgctaatagcataaaacccgccatgattggttgaggtctggaaatgatcgatattaaataccgcattggtatgcgtattatcaaatttatatacatctgcatgagcagcacttaataaacccagagacaggagagcaccaagaaaactctttttcattatattcactttatatcttaaataaggtgaagctatcttaatgtcccctgtacgcaggatcgagagggataaacaggaaggactgttgcaaaaatagaacgatgaaaaggccgtgtcacaaaaacagcagctcacgaatgagtttatgtcagggctatttccgcaacctgtaccgcctttgtggcggtacagaaggcaaactgactaacgcatgatacgatcgtcgacataacggcgcttatccggcgcgggcgggaaatactgatacagccaggtttcgctgatagcctccccctggcagcgcaggaacatacgcatatccaccggtgccgtagaatccgaggtcggataccagtcaaactggatacgataaccgtcgaaaggctcaacgtagaggatctcaatctgcttcgcctcaccgctggagagcgtaattaccggctcaatgccttttggcgcggccgctttcagatcgccgccgacaaaatcaatagcaaaacggcgcgcccatttatccgggtaatgttcgcccggcgcccaaccttcgggaaagccgcccatccctgtacgggtcgccatgacccgcgcaagcggcgattgtaccggcggctgcgcgctccagtacaaacgataattgaacgccagcgtatccccggctttgatcgctttttccggctgccagaaacagaccacattatccagagtttcgccagtggttgggatctccatcaggctaaccgcgcctttcccccacttattgcgcggctccacccacaggctcggacgtttgttgtaccaccccatcacatcctgataatgcgagaaatcgcgatcgagttgcagcaggccgaaccctttcgggttatcgtccatatatgcattgaactgcaatttctgcggattattcagcgggcggcaaatccactcgccgttaccccgccacatcgccagccgatcggaatcgtgaatttgtggatgaatggtgtcgcatacccggcgttcattattcccacagctaaacatactggtcatcggcgcaatgccaagttgcttaatatctttacgggcgtagagatggttttctacatccatgatcacctgcgatttttcgcaatgaatcacaaatttatacgcgcccgtcacgctggcgctgtccagcagagcgtaaacggtaaacgtagtatcgcccggcttcgcggtgtcaaaccagaatgcggtgaagtcagggaactcttcctgaccgtcagtataggtatctatcgccagcccgcgagccgacaggccatactgataagtatcatctaccgcccggaaataactggcgcccaggaaggagacgacatcgcgccgcgccagttccggcgctttaaagacacggaaaccggcgaaaccgagatcgctctgcccttccagttgcgtcgtatcgacgccggcatcgttgtatttaaacagttccgggcgaaaatgaatctcgcgagcaagatgcgtcgtcgtatcaacggaaaacatgcgtacgcgacgacgaaagcccatccctacgtggaaaaactgaatatcgagctgccggttggcaacaccgttccagagtgaatgcgccgcgtcatactgaatgctgttataggcctgcggcgtcagattggcgagcgtatccggcaagggtcccggcgcgccaccccagggctttttcgctaacgcctgggccattgattgcagaccagcaaaatcaaaacggacaattttaccatccgcaatatcggattccgcggcaaacgccgcctgagaaaagagggaagcaataccgctggaaccgcacacggcggccattgccattgaacctttaataaatcgtctacgattcatacctgaaaatgagtccttctggtcttgtgaatggtcccgcgctggttttttcagcagcaagaatgtgcccgtttctgaccgctcactctagacaaaattcattaataatccaattgttggtcgcctggaaactgtgcaaaagcgtaaatattttatgtcgataagaaccgaccgaatcggatgtaaacctcacgcagcattcttcaggttatgaaaagtttattccagactaacgtgatgtttcatgactcgtttaaacagcgccagacgcgcacgcataaagcggttttccactttaaaaccggcaagtttgttcagcccaatccgcaacagacgatctcgcccccgaatgctggcgggccagcgaaccgggccgtgcagcacgtcgcgcgtgcggctggcatgacgagcgaaattcacccagtaatccgccacctgcgaggcaaaggccaggtcattctcattcacataatggcatgtgggctcagcccgcgttaacgtatcgaatacatacggtatttcattgccatgacaggcaccattcgcgtaggtgttatgctccgcttcggcgacataatcaaaccagtaacgccagcacggttcgccgatccgctgctgcgcttgcatgacgacataacccaacgtggtaaataccatatcccgacagacctgccgccctagcgcttcgtcgcctttcactccaggataaagcagccggattaaccccaggccaacacgccgctcacggcgcattttttgaatttgaccggcaatatcgacgccaaaaacggccaatacgctggcttcatcgctattcgagccgatcatcaccggtatcggatgctgtttcgccgcaaagaaggtttccagcatcggatgcggcagcacgacgtcgccggaaatcggcgtcggcgcaattttaaaaggcgcgtccagcggccaaaacgtctctgccggtaaagcgcgtagctgttcggcagtggcatgggctaaaccaagatgttccgccagcgcaacgcctttttttagcgccacctcgcggggcgtatccggcagcgtataaccactctgaataatcgctttatgaaaaagccccttcgccaacggcgaagccatcaacgacagcacgctgcgggcgccggcggattcgccaaataacgtcacattctgcgtatcgccgccaaacgcggcaatattgtcctgcacccagcgcagcgcagcgatttgatcgagtaaagcaaaattatgaatacactccgcctcttcgccttccagcgccggatgcgcgaaaaagcccagatggccaagccgataattgaccgtcaccacgatcgcgccgcgcttcgccagcgcttgaccgtcatagggcggcaaactccccgcgccaatggtataaccgccgccgtgtagccagaccatgaccggcaacggttcatgacgcacggcgggagcccagacgttcagatagagacagtcttcggaaaaatttcccggatcgccgccgccgagttcgcgacaccaggtaatatcctgccaactggcgcaggagaaacaatccgcctggcgcacgtcgtgccagggcgtaacaggctgcggcgcacgccagcgtagctcccctgttggcggcgcggcataaggtataccgcgccagatatggatttcttcctgtacgacgcccacgattttaccgtgacgcgtctccaccaacgggatggagggattcaacataacgccttccttttacagtatcctcacagcctgtgaagcttaccgcttttaaagcagaccgcaacggcgtttactgcgttcttccgcttcctgatataacgaaaattcatcccgtactgcacatcccagcgcctgttcaaaggcgtcgcggctggcattgccgtggcttctggccagcgtttcatctcccaaattcgactgaaaaatgccggctgcgctgaccggaagaaaatcttcataggtaatcggctgcgcgattacccaaccgcgctcaataagcggctgcggatcgtcgccaggatggatcgtctgacgatgcgcctcgccggaaggcgttaagcgatagcggaaccaggcaagcccctgctggcgaagcagaaattcgctatccggaaaggcgttaaagacctcccgcaaatggagttgatgcgtgaagttatccttacccgttcccgccttgtgcaacagttcgtcatataatcgacgaccttttggcgtcagcgcgacgccacgttgctcaatttcgccgaagcgcgccgtgtgcgtaccctgcttttcatcaacgaagagcacctgctcttccagagctttgaaactggtttgccgcaacagaataggcacttcgcggcgaggcggaccttcgataagaattttaggcgtaatgccgcactccggcatcatggcctgtacccggtcgatatccagagtacgcggcgtcagatggttaatgtggcatcccggaaaacagaccacgtcggcaattaaacgatgctcacgatgcaggctgcggtacgtttcttcatcaacggtagcctgacgatgccagcgaaaagtctccagcgtttcacggacgaactcttcggcctgagcagcgctaaaaccgccctgctcgtcgtactcatccagcaattgtcggcagcgcgatgtaaaaatatcacgctgcgataagatttccgccgcccgctggcgtaatgccgcgttttcaatgagctccaggcgtaatagcgaagtgaacatgcgaaagggattacgcgagagcgaagcctcgtcaatgggacgaaatgccgtggagtgcacaggcacgcccgcctgagagagatcgtaataacttactgggtacatccccatgatggcgaatatccgacgcaaggtagaaagttcttctgcggtgccaacacgaatggcgccatgtcgttccacgttcaatcgcgccagttcatcggcattagccaactgctcatgcagtttgggattattttccagcaccgccagattcacgtcagccacaagttccagtaacgtaccgtactgcggaacttcctgctggtacattgccgacattgcctgcgaaaagtgttcccgaatctcatctgccgtgatggtgttcgccataatgtcatgcctccagtgaatgttacctggagtgtagaaaacctcatccattccggggagaagaatttataaagtgtgatccgacctgaattcattatgcagaacggattgacatgagctggcatatccccgaccagatcgcggcttaacacgcttaacggcagttgaatcatcagtaaaataaaacagttgtaacttgaaatggtaaaatgttaataatattttgctatcaggttatcaaaaacaaacaactttacttgtcacccgcacggctctgtttttaacatcgcttatggaaaaaaatggtctgtttagtcagcgcattcggttgcgccaccttcatacatttgtcgccgttgcgcaacagggaactctggggcgcgcggctgaaactcttaacctgagccagccagcgctttctaaaacgctgaacgaactggaacaactcaccggaacccgtctgtttgaacgcgggcgactgggcgcgcaattaacggttcctggcgaacaatttttgactcatgcggtaaaagtattagatgcattgaataccgccgggcaggcgctgaatcgcaaagaggacgctagcgccgatgtggtgcgtgttggcgcgctccccaccgctgcgctgggtatactcccggcggctattgggcggttccatcaacagcaaaaatcgacctcgttacaggtcgcgaccatgaacaatacgatgttgcttgcgggtcttaaatcaggcgagatcgatctgggtattggccgcatgtcagacccggaattaatgggcggtttaaattacgaactgctgtttttagaatcgcttaaattagtggtacgccccggtcatcccctgttacaggagacgatcacgctcagccgggttatggaatggccggtagtcgtctcgccaaaaggcacggtaccgcgccagaatgcggaagccctgttgcaaagccaggggtgtaaaatgcctgccggatgtatcgaaacgctatccgcatcgttatcacgacaactgaccgtagattacgattacgtctggttcgtcccctctggcgcggttaaagaagatcttcgccaggcgacgctggtctcattacccgtgccgacccagagcgcgggcgagccgataggtattcttacgcgagttgatatcccgctctcaaccggggcgcaaatgctgattgcggcgatccgtaaatcgatgccgctgtgatagcggctgtcggagaataaacgcgcccgcggctaaaatagcccgctggcgcgacgcttactaaaggaaggatgatcgcatcgtcgcgccagtatcatgtaaacgaaacgcatcaacggcttgcgtcaagcgggcagcctgttcttcaagcgaagctgccgccgcggacgcctcttcgaccagcgacgcgttttgttgcgtaaccctgtccatctcagaaatagcctgactgacctgaacaataccgcgactttgctcatcagaggctgccgcgatgtcgagcataatatcggtgacgcgtttgacggcatccacaatctcattcatggtgctccccgcagcgataacctcttcagatccttgttcaatcaggctgaccgatgcgccgatcaagccttcaatctcttttgccgcctgcgcgctgcgactggcgagggtacgaacctcactggcgaccaccgcaaaaccgcgtccttgttccccggcgcgtgccgcctcgaccgccgcgttcagcgccaggatgttggtctggaaagcgatactgttaatgacggcggtaatttccgagatttttttcgagctggtggaaatattccccatcgtttgtacgaccccggaaaccatctggcctccgcggctggctttaccggaagcatcttccgccagtttgctggcgtgatgcgcattatccgcattctgcttaacggttgccgtcaactgttccatactggccgcggtctgttcaatggcggcagcctgctgttcagtacgagaagataaatccgtattaccagcggtaatttcgctggtgcctcgataaatttcctccgccccctgacgcaccgcccctaccgtttgttgcaacgcatgctgcatctgctgaagatgatggctcaggcgaccaatttcactgcgtcctgtgggctcgtcagccatggtcagatcgccggccgcaatgcgttcgatacgtgacgcagactgctgcaagggttgtatcaccgtgcgacgcagcaccatgaaggtcattaacgtcaataccagcgccaacgtaaatgcgccaatcataaacatcataccgagccgggtacgttggtaagcctgctcgctaagtagtctcgcccgctcggtgcgcagttcaatcgctttcaacaggacatggttatatgcggcatccagttgttttgcctgctcgttttcatgattaatgatcgcttcgaacatgccatttttggcaaatttcagcatcggttgcaggccgttgatataggcggtgtagcgggcgtttaactcgttatctaacgcgtcatcggcgggtgttttcaccgctctggacatataagcgttaaagccgtcctgagactgcttgatccgcgtttccgcagcggcaatattggctttcatttcatccatttcagcaatccggctcgccgcgccagcgtggatcatattgatacgtgcggtacgtaagtggttagcgctgttggataatcccatccgtacctgaatctcgtccgtgacatcacgctgatcgcgatcggcctgtaacagaaaatagcctgccagcccggcgctcaaagcaaaaagaagaaggatgccaccgagaatggaggaaaacagcggaaccagccgaatatgatgcaggaagcccagtttatgcgaggcttgcatcgagaatgtgttgcccatgaccgtcgactctcttgtaggttttatgcgtaaaacacgcccgttagatagtcatcggcacttcgtgacgtttgcttatcgcgaaaagcatcgccttcgtcacattttcacaacattcattccagaaaattcagaaaagcgccagcggaaaatccgctggcggatgaatcagttatcgccaaagtggataacagtacggatggatttaccctgatgcatcagttcaaaggcatcgttaatctgctccagcggcaggcggtgagtaataaaaggatctaaacggattttaccgttcatcgcatcttcgaccatccctggcagctgcgtgcgccctttcacgccgccaaaggcggagccacgccagacgcgaccggtcactagctggaagggacgggttttgatttcctgccctgcccccgctacgccaataataatgctttcgccccagcctttatgacaacattccagcgctgctcgcatcacgttaacgttgccgatacattcaaaactgaaatctacgccgccatcagtaagctcaacaataacgtcctggatcggtttgtcgtaatcattcggattaataaagtccgtggcccccatttcgcccgccagcgtaaatttttccggattcgtgtcgacagctaaaatacgcccggctttagcctgaaccgcgccctgaataaccgccagcccaataccgcctaaaccaaaaacggcaacggtgtcgcccgctttcactttagcggtgttatggacggcgccaataccagtcgtcacgccacagcccaacagacacactttatccagcggcgcctgcgggttcactttcgccagagaaatttccgcgcaaacggtatattcgctgaacgtgctggttcccatatagtgataaacgggttcgccgttataagaaaagcgggtagtgccatccggcatcagcccttttccctgagtggcgcgtacggcctgacaaaggttagttttaccggacttacagaacttacactcgccgcattccgccgtatacagtggaataacatgatcgccgggtttcaggctggtgaccccctcgccgacctcgactaccacgccgccgccttcgtgacccaggactgccgggaatacgccttccggatcatcgccggaaagggtaaaagcatcggtatggcaaacgccggtatgagtgattttgaccagaacttcgccttttttcggcggcgcaacgtcaatctcgacaatttttaacggctgaccgggaccaaaagcaactgctgcacgtgatttcatatatctcttcctgttacggtgagggaaattgttattttagataagcgcgaagaagatggccgatttccgccatccgaaccgcgcgctgatctggcgtagtctccccgctgaccagctcatctttcagatggatttcaaccatttcactcatcaggccattagacgcgccgcgcacggcggcaatctgttgcagaatcgccagacaaggttcgccagactcaagcgcccgctccagcgcttcgacctgcccgcgtatgcgacgaacacgggtaaggatacgttttttatcttcaggtgaatgcggcattcgacctccatatactataggggggtatactatcagaattttatgtttatgtaattgtaaaattacgcacaatataaaaatcaatagcttatagatttccggcatagaccatcaagaatcagttcacattcagcatattcagctcatgggaactttttcaggccacagacaataaacaccaaagctttctttctaagctgcaatgttctgcccgactggggcacagaggtaatgccggtaaatccagtcccattacccagaagtaaatatttgcttaatagtttttatttactcaccaggtggtaatgaataaaggttatgatatgcagatgtcagtcttgtaagaacgtaacatcacaactgcgatacaccgccgacgggtagcgaaaatatctcaaccctgtgtctttccaggcttagtcaatgtggacaaaaaatcaaatgagcgttatttgaaagatttttaatacccaaaagcgtcatcattattgttagtttgaaatcaatctcaggtaataatccatgcctatttcgatttgtaaacatggtgctccttttgttgttcaacatgaaaatcggtacggttccggtgcaagtcagtcatcatcactttcaaaatcaatccgccatattagcaactctcatgaggaaataaaatttataagttgctatagtgcaaatggagcctgtttttccaatgcacagatgctagccaatgcctcagggaggcctgttataggttactatgggaaaataaataagttaacagccagtctggataatagcggtcgtatattccgcccacagcataagcttgcggccaatatttgttatgtaggtaatcggcttctgagcgctccagttcaacttgggtttggcctgaaacatctgctaacctgtcactcaaatggtaatgtcagataaagtgtcatgccatgtccttcccggcattgctattccacagcctacagatatgggcgctcagttctttcctcaatcgttgctatgggaagttctgccgtcatttcacgctcttgccaaccagcattttattaaagcctgacttttaccagagtaatttcataagagtgcccatcttctggtctaaaaataataaatctattgttatttttagtaaaggatttcgacaaaataaaactatcatgatatctggccaggacgtagtaccagcctccatcatacaatatcatttcgtattctttctttaattgtggtttatagatcccaacaaaaaaagaaaatataaaaaaatatataataaaaccaagcataactatagtgaaacaatgccttcgcacccaactgagttgcgtaaaacaaatcactggcatcaatttactataaaaacgcatccccaccgataagcataaagctaccagtaaaatgataaaaaaaagctcccacaaaaacgattctgttaagagagaaaactcgataacaattggaataaagaacaaaaccgctgccaaaaaaagacgtaaaaagctaatgtcgtggatacgtgctttttgctttactagaaaaaataatagaatacccactccccacgctattatgaatatagccatcaggctaatcgcatggaatagacttcgggcaatgttgtcagggccgacgcctacataccaccacgggaaaccatagtacgcggagacgccccagccataaaaataggcgcttccccatcccaaaccacctaaataggccaaaagcatcgaagagtttttaataattgaatcatcattcattatagttaactcacttaagaaatatttaatatgaaaatagaaatcaaaatgtcacataaaacactagcactttagcaataatagtcggatgataagtttgtctgtttttcctgagtatcaagccagctcatactcacgccagcacactaaaatcaggagtggcttcttttttagatctttgccttagccaggcgcacactcaataatgatagcagtcagataatatgtaccaggcattaacctcacgttgttgatgatatatttacttcgttgaaaaacaataaacattgtatgtattttattggcgacgaaaaactgttaaagaagcgtaattccatatacaccatttacctgattacttttcttgctaatatttgctaattaattatttgctaaagcgtgtttaataaagtaaggaggacactatgccattgagtgttggacagggttatttcacatcatctatcagttctgaaaaatttaatgcgataaaagaaagcgcacgccttccggaattaagtttatgggagaaaatcaaagcatatttctttaccacccaccatgcagaggcgctcgaatgtatctttaatctttaccaccatcaggaactgaatctaacaccggtacaggttcgcggagcctacatcaaacttcgagccttagcgtctcagggatgtaaagaacagtttattatagaatcacaggaacacgccgataagttgattattaaagatgataatggtgaaaatattttgtctattgaggttgaatgtcatccggaagcttttggtcttgcaaaagaaatcaataaatcacatcccaagcccaaaaatatttctttgggtgatattaccagactggtattttttggcgacagcttgtctgactccttagggcgtatgtttgaaaaaacacatcatatcttaccctcctatggtcaatactttggcggaaggtttactaatggatttacctggactgagtttttatcatctccacacttcttaggtaaagagatgcttaattttgctgaagggggaagtacatcggcaagctattcctgctttaattgcatcggtgactttgtatcaaatacggacagacaagtcgcatcttacaccccttctcaccaggacctggcgatatttttattgggggctaatgactatatgacactacacaaagataatgtaataatggtcgttgagcaacaaattgatgatattgaaaaaataatttccggtggagttaataatgttctggtcatggggattcccgatttgtctttaacaccttatggcaaacattctgatgaaaaaagaaagcttaaggatgaaagcatcgctcacaatgccctgttaaaaactaatgttgaagaattaaaagaaaaatacccccagcataaaatatgctattacgagactgccgatgcatttaaggtgataatggaggcggccagtaatattggttatgatacggaaaacccttatactcaccacggctatgtacatgttcccggggctaaagaccctcagctagatatatgtccgcaatacgtcttcaacgaccttgtccatccaacccaggaagtccatcattgttttgccataatgttagaaagttttatagctcatcattattccactgaataaagttccatcggctgcggtacgccttgagcaaaacacagctcaatatcatagtgccggtggcatgaaaatatgatgctatctttgctgccgattggtcaataagtgatacatagtctatgttcagtaagacaaaaatggatagagtcgataaatcgccaccgtaactaaaatactcactatcacactgacaataaagtatgttttgaatggctgcttttgcgttttatgacggaagagttgttgaccaacaatcgccccaggccacccaccgacaaccccaaacaccaacaaagtggattccggcactctgcgccaggttttacgtgccgccgttttgtctataccgtagatcgccagcgttagcacattggcgagcaggaaccacatcgcgacgggatgcgatgtaaaaatgcttccgaccgcagcgaagatcaggagtaaataacaaaagcggttaagatacatatcattatgtcatagcaataattaggggcatcggagcccattatacgcgatacatgcgcctatgtgatgtagaatttttttcactcagccaacgagtcattaaggattcatttttaattaccatggtaatcataaggtaattaacggctgtgaacacgattaaaatgggtaaagccaccgaaaatgttaccaccttaaccgttgccaggataacttaatgaagaaccctctttattgctgtttgttatccggttggcagtctcagttttggatttattaatcgtatttatatttattacataagatgtacgatgttaatttgagaattttatctcaacaaccgtatatattcagatatttctgaattaagattatcatcgattaaaacaagttaacgttttgataaacataacaacatcgtcagaaatcatgatttgttgtcgtttgttcatgagacaaataatttatatgcttgcaaatatagatagcacgcaaatcaacttagctcaaaaaatgtatttgacaagaaaagataagtctttatattggccctggatagagtggtaagatgataattagagacatgaaaggcaccgtcactgaagcatttatctgcttatcatgtaaatatgtatgcgtaaatggagcataaactatgtccagtatactaatgtctatggtatctttacattttcacctttcatggtgtcgctgcactcatatccagttgatatcttatggtatattcaatccattccctttgatgattcctgtcaaacctcctgattaaattagttaacagcgatggaatacataacgttaagtactttacgcctgcaaatgtcaggctcacgccctaatgcttaatttataatacgcattaccttactacaggaaatagatagcatgttatccaaaaaatttggcttatcgatgatagtgttgggaataatgtcgtcttcagcgtttgctgatagcatcgttgaagggagaacactcaatgtcgcagtatcaccagcctctccccctatgttatttaaaagtgctgatggcaaattgcaggggatagatctggagcttttttcgtcttactgtcagtcacggcattgtaagctaaacatcaccgaatatgcctgggatggaatgcttggcgcagtggcgagtggtcaggcagatgtagcattttcgggaatttcaatcacagataaacgtaagaaagttattgatttctctgaaccttattacatcaactctttttatctggtcagtatggccaatcataaaataacgctcaataacctcaatgaattaaataaatattctattggataccctcgaggaatggcttactccgaccttatcaaaaacgatctggagcccaaaggatactactcgttaagtaaagtaaaattgtatccaacctataatgagacgatggctgatctaaaaaatggcaatcttgatctggcttttatagaagagccggtttattttaccttcaaaaataagaaaaagatgccgatagaaagccgttatgttttcaagaatgttgatcagcttggcattgcctttaagaaaggctctcccgtgcgcgatgatttcaacttatggcttaaagagcaagggccacaaaaaatatctggcattgtcgatagctggatgaaatagtaagctatgtcatcaggtaatatgctggctatcttttatttcctattggaagggattggtaatacgctgcttgtaacatttacctgttttctctcagcgtttttgaccgggcttacagtcgccgtattacggcgactatcccctcttccactacagaagatactcgacgtactggtctttattcttcggggaattccaatacttattgctgtttttcttgtttattttggattgccatcgattggcatatatgtttcaccactggtggccatgaacctcagcgtcggcttaatcagcgggagttatcttgccgaggtgttcagaggggcgcttaaattagttgagccattcgaaataacggtagcgaaagtggcaggaatgcgtcaattacaggttataataaatattgaactgccacagatgttgcgattttctgtgcccggtattatcaatgagttttcttctgtattaaaagcgacgccctttgcttatactgtaggcatcgctgaaataacgaagcaggcaatgtcactgacagccatcacgctgaacgggttacagatttatactcttgccggggtattatatttcattatttataaagtatttactcttctggccggagtgtttgagaaaaaatatcgcatcagttgaaccataaaaatagaggtgatactcatggctttactgaaactaaaagagataagtaaggaatattcaggaaaaaaggttcttgatacggttagtctgaaaattcaatcgggagacatgaaagtagtcatggggccatcaggttgtggaaaaacgacgcttttacgctgtctgcttcgattagaagaacctgattatggcaatatttattttcacgggaaaaatatttacgacaaagaatttactattcttgagttcagaaaaaaagttggttgtgtcttccagaattacgctttgtatcgccatcttaacgtcatggataatattacccttgccctatgtaaagtgtttggcatgccgggacaactagcccgggagaaagccttacatgagctacaaaaacttgatatggcctcgcatagcgcgaaatacccttcgcaattatcgggcggccagcaacagcgcgtcgccctggcccgaacaatggtcaccgacccagaactcattatttttgatgagccgacgtctgcgcttgatccgctcatgactcgtgaagtcggaatgttgatcaagcaacttcacgacaatggcgtcactatattatgcgtcactcatgatattcgcctcgccagattactaagcgataacgtaacgtttcttaatcatggcaaaattcgtgcagaaggcgcttttaccgatcttgccttacgagaaacggatccagatatccactgtttttttagcgaggcacaacgatgatcgctggctggtctctcttctttaatgacctgactgaacaactgccacttgttgtggacggtattaaagaaacctgtaaacttgcgctgattgtttccatcaccggttttttgtggggaattattattttctttctgagcctgagccatcgccccgtggtaaaagccataactcgactgtacatggatttctttatcggtacgccactcattcttattctatttgttatctattatggtttacctcaatctggcattcacctgtcctcttttaccgtggcggttacaggttttaccttgaatgtcggcgcatataatgccgcgtacatgacaacggcctataacgcattgaataagtatgaaacggaggcagcagtcgttcaggggttgaacaaacggcaggtctttttgtggattatactgcctcaggtattgctgtcttccattccagccttaacgaatcaggtgattaataaccttaaagacagcaccatcgtttttcttatccaatatactgagtttttcgcgcgaattcaggaggttgctgcaaccagctttaaattcttccatgcttacctttttgccgccatagtgtatcttattggcgttacctttatcgtcggtttgacccggtttttagagcatagactgcttcgccattacggtcagggttactgagttgtactgcactattctgattaattcaccactgacattatcaaagttatttttatttagcgttgattaagattttaaccttcattattgcgttagatgtccattctggtctaagtcttactccattgaggatattatggcgctaccacaactatcaatatggcagcccggcgatgggttaagaaaaataaagtataaatatcatgtttgtctcattgtcatattctccgtccttatacggttgctgtttttaactgaccgctacctttggtgtgacgaagcgtccagcgtgctgattagtcgacatagcgtagataatctgctcttccatgccgcttttgacgtgcatcctccgctttattatctgttactgcatgactggatgatattatggggtgatagcattgcagcggtacgctctctcagtctactctttgggatcctgacagttgtgctggttatcgcgcttacgcgatggctggcaaatgaacgtacagccttattggcgggatggttcgccgccctgatgccgatggcagtccattacagtcaagaaacgcgcatgtacgcgttaatgggaatgctaacgctcgctgccgcgttagcattgatgatgtggataaaaacacccacccataatcgctatcttgtcgcgtatgctttacttatgacgttcagcttttacacccattatttcaccctatttacacttattgcccactggatcgcagtaacaatattatcctgccaaagccataaaacggcctgctaccttaaacttcctggctggtggtttgctaacctggcgattgctgtcgcttatctcccctggttgcccgtattgtttaatttactgactcatctggcgcagttgagagccggtaatgatatcggttggattccccccgtaacatggcgtgacctgcctgcgatgtactggcatttttttaccggaaacaacggacagggttttccgtcgttcattctgtggctggctgtaggaggttttatcggtactgtggggcgaatatctttatgcaacggagaatatgaaagatatcagctgatattattttgtaatctggtcatccctgtaatgctggtcttcatcatttcctggtggatgccgttatttatcgatcgttatttcttcttctcatcgctgagcattcctcccctgctcgcggtattacttacccgcgcaaaaaaagcggtttgtggcttctggtttatcttattcaccttattattcggctatggttcatatcataataaccctgagcacatagacgagtttaaaccactggtaaactatattaatacccgtcaccagcctaatgatgccgtggtagtcagtaaaatgttcgattatttaagttatgtgtattataataagcgagattatcgtacgtttctttatacaccgcctaacgcacacggaacatcaggcagaccgaatgcctatggctttggttcactgttttatgcgcaagccgatcagacatatattgatactctgacaacgctttcaaaaagttaccatcgtgtctggttggtaagcggcggtaactttagtcaggattaccccttgccgtcagaatggcaaaatatcgcaaaattcagaagtggtagatttcaggtacaattatttgtaataccaactcaacaggcgcgtcaaatgcaatgattaccgttttctatccagtgcagtgataaacagtactgccactgccagaccgcctaaaagtaaggtccagccaaacgcttcaaaaacctcaatcatatcgcctccaggtaggtgatattaaataaagatggctatctcagcgtaacatttaaaatatcaattaatgtgcaataatcgctttatgtgtttgaataaatattgttcttcctgcatttaattgcattgttattatcaaagggcttaatacgcgtacatcaacgattattaattatcagcttataataatatgactgttcaattcatttatcagctattattatcctctatattctttaagataaccgcttaattcataatatcgcctttattcgtcgcattaaattactcactcacctgattaatgcttgcctaacgattgcttcgttgttttaattccagcgcgaaattatttagtgagagaacaatgaagcatacacaacaatcaggcgcaaaagtctataacccattcacgcttagcttatatgactggtgggtactcaatatctcaaacaaatatgcctggaagtgtcctactgatacgcgactacttcctttcttcctgcatcacatgggcgagactcacctggatattggcgtaggtacaggttattacctgaaacatgcacctgcgactcatgccatttcgctgatggatttaaatccggatagcctgaaaatagccgccagccgagtgggtaatacgaaaatccgcgccacactacaacacgatgttttcgacacgttcccggcggactggcacgggcgcttcgattccgtttcgatgtactatcttctgcactgcttacctggtgagatgacaacaaaagcgaaggcaattaaaaatgccggtatggcgcttaaacccggcggcacactttttggcgccacgattctgggcaaagaggttcctcacaatgcttttggtaagaaattaatggctgtttataacaagaaaggaatattcagtaataccaatgattcagccgatacgttacgcagcgtgttggacgaacatttcgctaaggtgactttggagcaacatggcgccgttgcgctattttccgccactacgccacgctcatcgtaagtacaggcacttccgagcggtcggcagcgcgatcatgtgggtttaacccgttgattaaacattggattacggaatagtaattgcttattttatttgtcatacaaataagtataatacccgcttccgatgtagacccgtcctccttcgcctgcgtcacgggtcctggttagacgcaggcgttttctgtatggaatacgccatcccctctgatagatgccttgtttgccttaagcagttaaccccgcctgaagcaaacgtcatacaggacggtcagtcacgcttacgcggcatcatccgtaacagcgtattgtctttccagaaatagtgatgcatcaaagcagcgatggcatgaagtccaataacaaaatagcccagattcgccagcgtgacgtgccaggatttcagcatatctacgcgttcaaagttagcttcggcggcatggggcatagtaatgccaaatgcgacccagggattaccgcggttatacatcatgaccagaccaataacaggcagcgcgataaataacaggtaaatcaccagatgtcctaaatgcgccattccggtcatcatcggttttggacgaggaacaatgggcggcgtgggatatttcagccgaataaacaagcgtgccaccattaaaagcaaaatagtgataccacatgaaacgtgcgtcatattaaaccagggccgataactacgcggcgcaaaaccgcgcagctccatcgcggcgtaagccacaataaccagaaaaaagactaaccagtgaataccaatttgcaggccggaatacttattgcccatagcgcgtcctgaatgaaagccgtaaagcgacaacataaccagcttttataaataattcatcaaatttatgaaatggtggtcgcacttgcccgttcaccctcgcaaacgggcgatttttagcgtaaagctctctgtcctaacgcactgcgcagcgtagtatctgcctgcaatacctgccatgcgttttcaatatcgcgtgggatatcaacgtgaatgataaaatctttaccacgcggtccataccctgtttcatcgtcacgcaaacggggcagctcgccggcaatcagagacagataacgctccaccgtccagatgccctcttcaacattggcaaaacgtgtaccgtcattaaggtggcgcagtaccggaacaaaaccaggaaaactcagccagcgcggcgcatcggtgtcgtcgtttgtcacgcgccggaatgccgcgatagtgcgccgctgcatggtggggtcttgcacaacgatagccgtgttaatgttttctttcgcctgacggatcagtgcgcaggagaaacgggcattttcgccgcaattagttgaccgatcttccagccaaattttctcagccggaatatgccagaactggttcgcgatatccgcaaggatcgcggcttcagcgcgtccgcttgtgcgaatagtgtggtagcgcggatgccgggcaatcacggcgtacaaaaacggcgtcgaatgacctataccgccgctaatcagtaaaggaacgccttgcgctttggcgatgcgacaggccgcgtcgatagtggggatcaccgcattgcccgccaggacgacgcaatccgacgaataaggttgttcgccggaaaaatcattttgcgccagccactgtccgacggtattcaccgccagcaatgtttccgcagagagcgccggaaatggcgttgtattcataattcctcctttttgttccgaacttgtaccggatcgctttgaaagacgtcgtcgcctggctttttaggccgtaatctgatccatggcctgtaaaatacgcttatcggaaataggataaggcgtaccgagctgttgggcgaaataactgacacgcagttcttcaatcatccaacggatctctttaacatcatcatcttcgcgacgcgctggaggcaatttatttatccattgttgccacgcctgctggacgctttcgactttcagcatttgcgcccgatcgcggtgcggatcgacagccagtttctccagccgcttttcaattgcctgcagataacgcagcgtatcgccgagacgtttaaagccgttgccagtcacaaaaccacggtataccagaccgctcatctgcgccttgatatcggaaagccccaacgccatgctcatatccacccgccctttcagacgcttattgatattgaatacggtcgtcaggatccgctcgacctgcttcgcgatatccaccacagtatcattcagctcggcgcgtaccttttcgtgcagcgcggtgaaacctgcttcgctccacaccggtccgccgttggcatctatcagcttatctaccccgcaggcgatacagtcatcaatcaactccagtactttgccgtacgggttaaagtacagccccagcttggctttattcggcaatttctcatgcagatacttaatcggtgaaggaatattgagcaacaacagacggcgtaaaccgcaccacatcgcctgttgttgttccagcggattatcaaacaatttgatagcgacgctgtcacgctcatccactaacgccggccacgccttcactttataattaccgcgtttctgttcgtagctttccggcagctcgccgaaactccagatatgcagcccgctctgctcgatgccgtcatccgccaccgccgagagcgtctcctgcactttgcctttcagcgcatttttaagctcggcgagcgaacgcccttcctgcagtttcttgtttttgtcattcaccacgcgaaacgtgattttcagatgctcgggcacctgatcccaatgccagtcttcccgatcgaccgtgacgccggtcatccggcgcagttcacgctccagagcgtccagcagcggcagctccagcggcgttacgcgacctaaaaacgcttcagcatagtttggcgccggaacaaagttgcgacgtaccggttttggcaacgatttaatcagcgcaataactaattcacggcgcagccctgggatctgccattcaaaaccgctctcgtcaacctggttaagtagcggcaacggaatatggacggtcacgccgtcagcatccgcgcccggttcaaactgatagctcaaacgcagcttaagattgccctggtgccagaagttcgggtaatccagtttgctgattttttccgcgccttctttaatcagcatacttttttcaaagttgagcagatccggcgtctcgcggctgatttttttccaccaactatcaaagtggcgggcggaaataacgtcatggctaatacgctggtcataaaactcaaacagggtatcgtcatccaccaggatatcgcggcggcgagatttgtgctcaagttcctcgacttccgcacgcaattttagattctcacggaagaaggcgtgacgggtttgccagtccccctccaccagcgcatggcggataaacaactcgcgacacaacgccgggtcaatctggctgtaattcactttgcgcgcggcgacaatcggcagaccgtagacagtaaccttttccgtcgccatcaccgcgccttgcgcccgctcccagtgcggttcgctatatgaacgtttaatcaggtgctgggctaccggttccacccattctggctcaatgcgggcagcgatgcgcccccacaggcggctggtctccaccagttctgcgaccattgtccatttcggcggttttttgaataaaccggaaccggggaaaatagagaatcgggcgttacgcgcgccggtgtactcttgtttatcggcatctttcatcccgatatgcgacaacagtcccgttaacaacgcaacgtgaatttcccggtactctgcgggttcgctgtttaccggaatccccagttcttttaccacctgacgcagttgggtatagatatcctgccactcacgcacgcgtaaatagttcagatagtcggtgcgacacagacggcggaattgattcgacgacagggccttttgttgctcgccgaggtaattccacaggttaacaaacgccagaaaatcggattccttatcatggaaacgccggtgtttctcatcggaagcctgctgcttatccactgggcgctcgcgcggatcctgaatagagagtgcggaagtaatgatcatcgcttcgcgcacacagccatgtttttgcgcttccagaaccatacgcgccaggcgcgggtcgaccggcaactgggataattgtcggcccagtggcgtcagcttatatgccgtttgctgttcgtcggcggtaatcgcccccagctcttccaacaaacgcacgccatcctgaatattgcgcttatccggcgcttcgacaaacgggaaggcggcaatgtcacccagccccagggcggtcatctgcaaaataaccgacgccaggttggtacgtagaatttccgggtcggtaaattccggacgtgacaaaaagtcatcttccgaatacagacgaatgcaaatcccttccgatacgcgcccgcaacgccctttacgctggttggcggaagcctgtgagatcggttcaatcggcaggcgctgcactttagtgcggtagctgtagcggctgatgcgcgcagtgccaggatcgatcacatacttgatacccggcaccgtcagcgaggtttccgccacgttagtcgccagcacgatacggcgtccgctgtgcgactggaaaacgcggttctgttcgctgttcgacaagcgtgcatacagcggcaacacttcggtatgccgtaagttcagcttgttcagggcgtcggcggtatcgcggatttcccgctctccgctcataaaaatcagaatatcgccgggactttcacgccccagttcatcgacagcatcgaaaattgcctgtagctgatcgcgttcagtgtcgtcagcctcttccacaatggggcgataacgaacttctacgggatacgttcggccagagacttcgataatcggcgcgttattaaagtggcgcgagaagcgttccgggtcgatggtcgcagaggtaataatcactttcagatcggggcgacgcggcagaagttctttcagatagccgagcaagaagtcaatattcaggctgcgttcatgcgcttcatcaataatgagggtgtcatactgcatcaatagcctgtcctgctggatttccgccagcaggataccgtccgtcatcagtttgaccatggtgttgctactgacatgatcgctgaaacgaactttatagccgatgcagccgccaggctccgtttgcaactcttcggcaatgcggttagcgacggtgcgcgccgccagacgacgcggttgagtatgtccaataagtcctttaattccgcttcccagttccatacaaattttcggcaactgggtggttttaccggaaccggtttcccctgccacgatcaccacctgatgatcgcggatcgcttccagaatgtcctgtttcttctggctaacaggcaaattttgcggataagtgattgaggggcgcgccgcttcgcggagggcgacctgcgccgcagcctgttcaatttctttcgccatcgtctggaaaatggcctgttgcgcatcaggattttttactttctttacgccatgcaggcggcgcgcaaagcgctgtttgtcgcgcagcatcagtgcatccagccgctgctgtaacacctgaagcgtcaacgtagattgttcagtcataaagctcttgggcaggattctgcctgtttaaaatcgttttaaatgataggtatagagtaccacattggggctttttttgcgttgttcaataatttcgaacaaagggttcgatatattgcgctatccctgcgacatatttgtgaataaagtgtcaacaagcaacggggcacgccccttcaaacacataaaaggaaacacccatgagcaaggtattagttcttaaatccagtattctggcagggtactctcagtctggtcagttgactgactattttattgaacaatggcgcgaaaaacacgtcgcagatgaaattactgtccgcgatctggcggccaaccctgttccggtgctggatggcgagctggtgggcgcgatgcgtccgggcgatgcgcctttaacgccacgtcagcaggacgctctggcgctgtctgatgaactcattgctgaactgaaagcccacgacgtcatcgttattgcggcgccgatgtacaatttcaatatcccgacgcagctgaaaaactactttgatctgattgcccgcgccggtatcactttccgctataccgaaaaaggcccggaaggtctggtaaccggtaaacgcgcggtggttctctccagccgcggcggtatccataaagacaccccgacggatttgattgcgccttacctgaaagtgttccttggttttatcggtatcaccgacgtgaattttgtctttgccgaaggcatcgcctacgggccggaagtggcagctaaagcccaggccgatgcaaaagccgcgattgacagcgtcgtggccgcttaaatatttttgcctcccgtttcgacgggaggtgacttcttaggtttgtagcgcaaatatcctaccacgccgctactgccgccatcgctgggatgcgttaccccatcattgacttcaacgcaggcgaaatcaaaaggcgacatattttcgatgcacgccacattgaccccatattgatcgggattggatcgacgctgatgaaaagtatatatcccgcataccgaacagaaaaaatgcaccgccttgcccgtattgaagcgatattcggtaagcttatcctgcccttttagcactttaatacccgacagcggcgcagacactgccaccgctccgcgcatcctgcaaaaggaacagttgcagcgcctggcggtatgaaagccatcgctaagttgaacggtaaacacgacgctgccacaatggcaggcagcagataatttttcagacgtcatacctggttactctcgcgaatagtgataccagccaacagtatagaaatagccttccggttcgcctaatgtaaatacgaccttcgtattcagaaattacccatataaaaatgcattttgcggtaaaaaaattgtcgggaagcggttatttacgcatccatttgccattaattccctggacatattctcccggcctggcgcgctcaaccagtttttgccctgccatcttcgccacctcgtccacgggaagatgattgctatccgctaactgctgataactggcgcggcgggcatgattaatatcaagcaccagtttctgggtttcggcatcattctttaaggccaccagatagccattcagcgtttccccgacccggccctgcgtgcgcgcttcgtccagggttaaggcccacacagaaggtgtgagcaagctcagcgtcagcacccatagtattaaatactttttcattatggcctcagaatagatcgctgcgtgatttcaggagttcttcaacgtctttatcgactttgatatgtatttcatgctcgatctttacattcatgttgatggtaatcggctgttccggcgcggcgacttcaatacgtggcgtgcaccccaccacgataaatgacgcaagcgctgacagcatggcaatactcattttcattatttatcctcacagtccttgtctttccggcaaggaggttgcggcaacgctgtattttgttcaagccatgcctgtaaattgtcgccaaaacgcaaactgcgccacagcgtaaacacattttcttcatgggtatagttcaagttaacgatcgcggttttaccatctacccggcttttgccggtaatagccgcctgcatcgttagtacgcccaggttatcaacgttaattttcgtccacgaatgcgtaatctccatataacgtagccagttgatcgccgagcctgccgtgacattatccttcaccaccgcatccgcagtatctttatcgatacgcaacgtcattggcccaggattcgtaagccagccatctttgattatccatttttcattgttcagccacagcggcagcgcgccgctgaccggaccagacatggcgaattgctttggatttatggcgctaatcaattcgctggatgaaatattttgcacccgcaaaagcgccgggtcgtgctgcggcattcgcaactgtttcataatgatttgaccgcccagcacgtctacgctgacatcgcttagcagtaatggattcgactcgctccagggataaccgccctgtaaatcagcggtgatatttttcgccgtgacctggttaactatcccggcgatacgcagcgagatgggcccgcgcgtccccaattgccacgcgccgttgtggaagcgaaatggcagaatgaaatcgacgccgttgattttgttatcaggcatccaggcgctgccgccttttaacacgccgtgtccacctgcttcaaatccctgcccctgcgcagcggaaaaagccacctgcgcatacagtgagccttcgcgcagcgtcattttccagtccggtggaagcaacggctggaaaacgataagcgactgcttcggccaccaggcctgtccacgaaggcgttcgccatcccagcgcccattcagccgtaccggccctatcgcccccgcccgaaggtcgcctttaaactggaacagggttggctctcgcccttcaacgctaaaattaagggtagaaggcggcagcacgctcccactggtaaatacggttttccccgccaccagagacagcgcgccctgtagcgacggcgttgtggcgtcgcgaacccagacaataggtttattcagcgccagtcttggcgatgtgacggtcattgcgccatagtgcaactgatcaaaaccggtggacaaactggtcaacctgatggtgttatcatgccattcgccctgtccggcaatatcccagtgggcgcgcattggcgtaaagcttccttgcccccaatagcgccaccgccagcgaccagcatcagggagaaaatcattggccaggccatcaagatgaagaacgaaatcgcccatctcattttcgtgcgcccgtaaaatagcctgtaatcggccatcaacgccgcgcggcgtcaccttaacgcccgccagcggccaacgaatttcatcaatatctaacgcatcaatcacccgcccgcgcgagcgtagcaatgcgccaggtgcaaaggtgagctgcggatcggccagactgccgcggaacatagcgggcaatacggcataaaagattaaatccttctgtttagcctcgccggtaagctgtagaggcatctcactgctatccatgctgagttttcccgggccgatagtcagtacagcgttcgctttaccggcatcgccctgggtcagaatattcaggcgtccactgacttgcgcattatccggcccggcttgccagttatcgatattaaaagccagacgtccgctcaaggggaatccctgatatggccagttccagcggccatcgctgatggtaagccgctgacgcgttaccgcccaggggagatcgagaatcgggtcaggattacctcgcgccatcacgatgagctgtccggcgttatcacgccactccagttccgcatccaccagcgacggttcctgcggcagacgcaaggtcgctgccgcatgaccgctgaccggcaggccatccggtaccagcggcaacacaaattcccccgccaggctaacgggaggctggttggccagcgcggcgatctccagttggctcaccgtcaatgcctgaccgcgtagctgcccttgaaattttactttttcgccctgataacgtatctgctgaatgaccggcgtcatggagatcgccagcttaccctgccattccggccagggcgcgagaatgacattatcgatgttaatccaggtattgggcagcattgactgccactgcgccagcgtacgcggcgcggcgggagaagcttccgtagcgggcagtttcgccaggcacgcggcatccagtttaaggcttttaatattcagcaaccaacggctgggatgcgtcagttccgcctgggtaatatgcgctaacgaacaatcattgaccagatagcgaagatcgggaatcactaacccatgacgtgtcaggcgtggactttgttccagagcgatacgggtaccgacgggtagccaaattcccgccagagtgggaacccacagcccgagggtcatcagtagcgtcagagggataagaatcagcagtaacagtagcgcaagggcggctttatatttacccttcatgggccattaatttcctgatttaacgaaaaattcagtcggctatctctttattttggcatgattgcccgtacatagcctaatagttcatgttgcaggggcgccctccggctatttgaggcgttgtggagaatgataacctaaaattattcattatatgtatgactatcaattatttttgattttttgtaagataattttaagcatatttgtgtgattcaaacatcactggagaaggtcatatgaaactcgccgtctatagtaccaaacagtatgacaagaaatatctacagcaagtgaacgaagcgttcggttttgaactggagttttttgattttctgctaaccgagaaaacggcgaaaaccgccaatggatgtgaagcagtttgtatcttcgtgaatgacgacgggagccgaccggtactggaagagctgaaaaaacacggcgtgaaatacatcgcgctgcgttgcgccggatttaataatgtcgacctggatgccgctaaagagctcggtttgcaggtggtccgcgtgccggcttattctccggaagccgtcgctgaacatgcgattggcatgatgatgacattgaaccgccgtattcaccgcgcttatcaacgcacccgcgacgctaacttttcccttgaggggctgaccggctttaccatgcacggaaagaccgctggcgtcatcggtaccggtaaaatcggcgtcgccgcgctgcgtatcctgaaaggctttggaatgcgtttactggcgtttgatccctatcccagcaccgccgcgcttgacctcggcgtcgagtatgtggatctgcaaacgttgtttgccgaatcggatgtcatttccctgcactgcccgctcacgccggaaaactaccatttgctgaaccatgcggcattcgatcaaatgaaaaatggcgttatggtcattaataccagtcgtggcgcgctgattgattcccaggcggctatcgaagctctgaagaatcagaaaatcggctcgctggggatggatgtgtatgaaaacgaacgcgacctgttctttgaagataagtcaaacgatgttatccaggatgatgttttccgccgtctgtcggcctgccataacgtactgtttacggggcaccaggcattcctgaccgcagaagcgctgatcagcatctctgaaaccacgttacaaaacttaagccagcttgagaagggcgaagcctgcccgaacgcgctgttctaatcctgtcgctcccctgcgctcaggggagcattttcggataacccctgaagatctatccggtcatatcattactatagtcagtgttaactatcagattacagagaatatcaatgaagaaaatcgtcacgctggtcgccctgagcatcataatgacagggtgtgtgagcagtggaaaagtgtccgtcaaacgcgagcaactggagcaccaccgctttgttctggaaagcgtaaacggtaaaacggtcaccggcccggagctcagctttggcgaggacatgacggtatccggcaaaatgtgcaatcaattcaccggcgaaggaaaactgtcggacggcgaattaaaagtgaaaaatttagcgatgacccgaatgatgtgcgcagatccacagcttaacgcgctggacggcaccctcagcgagctcttcagcaagggcgcgcaggtcgatttaaccgcgaaccaattaacgctggcgacggcagaaacaacgctaatgtataaactggcggatttagcgcactaagccattaagtgaaaagttatacgcgtcaggcgaaacgccgcgcttaataactcccgcagcttccggcggcaagcgactgttcgctacaacgtttgccgttgggtagcgcgcacataccaattactgaaccatcaagctgccgggccgctgaaagcgaaccgccaatcatagcgcaattcgcttcgccggcgctggacatcgccgctttcatccctggcgaaacatgtgccgcggttgcctgctgaacaggttcgctactgcaagccgacaataataacgcggcacatcccacccaaaacgctgcgcgcatttctctcccctctgtttattcatccaaacgacaccgccctaaataataggcagcagaaactgacgcgtcgagaggcaaagcgcgcatttatgcgcttcattaacatttattggcaattttttacgtcttttcggcaagaaatcgccattctcctcccgccagggacacaaaagcgaaaatggggcttgaagggctttgctaaaataaaaggataactacaggatgcgctcacgattatgcgtgtccctcttttttgcgcaatgtaagggtgtcatatgcaaacaattgacggtaatggcgcagtagcgtcggtggcgttccgtaccagcgaggttatcgccatttacccgattacgcccagttcaacaatggctgaacaagcggatgcctgggccggcaatgggcttaaaaatgtctggggcgatacgccgcgtgtggtagagatgcagtcggaaggcggcgcgatcgccgccgttcacggtgcgttacaaaccggttcgctttctacgtcatttacatcatcgcaggggctgctgctgatgattccaacgctgtataaactggcggggcagctcacgccgtttgtactgcacgttgccgcgcgcactgtcgccacacacgcgctttctatttttggcgaccattccgatgtgatggcggtccgccagacaggctgcgcgatgttatgcgccgccagcgttcaggaagcgcaggattttgcgctgatcgcacacagggctacgctgaaaagccgcgttccgtttattcatttttttgatggcttccgtacatcgcatgaaatcaacaaaattataccgctaacgaatgaaaccattctgaacctgatgccgcaggcggagatcgacgctcaccgcgcccgcgcgctgaatccggaacatccggtgattcgtggaacttcagcgaatccggacacctacttccagtctcgcgaagcgaccaacccgtggtacaacgccgtttatgatcatgttgaagaggcgatgaaggcatttggcgacgctacgggccgtcagtaccagccatttgaatattatggccatccccaggctgaacgcgtcatcataatgatgggctccgccctcggcacctgcgaagaggtcgtggacgagctactgatacgcggagaaaaggtcggcgttctgaaagtccgtctgttccgccccttctccgccaaacatttgttacaggcattaccggaaaccgttcgcgctatcgccgtgctggatcgcaccaaagagcctggcgcccaggccgagccgctttatctggacgtgatgaccgcactggcggaggcctttaataatggcgagcgcgaaacgttgccgcgcaccattggcggccgttatgggctatcatccaaagagttcggcccggcgtgcgtactggcggtctttaatgaactcagccgtgcgaaacccaagccacggtttacggtgggcatttatgatgacgttactaacctctcgctgccattaccggaaaataccctgcccggcagcgctaaacttgaagcgttattttacggtctgggaagcgacggcagcgtatccgccacgaaaaataatattaaaattatcggtaattctacaccgtggtatgcgcaaggttatttcgtttatgactctaaaaaagctggcgggctcacggtatcgcacctgcgcgtcagcgagaaacccattcgttccgcttacttaattgctcaggcggattttgtcggctgccaccaattacagtttatcgataaatatcagatggcggagcgtctaaagcccggcggtatctttctgcttaatacgccgtacagcgccgacgaggtctggtcgcgtctgccgcaagaagttcaggcggtgttgaatcagaaaaaggcgcgtttttacgtggttaacgcggcgaaaatcgcccgcgaatgtggacttggcgcccgcatcaataccgtcatgcaaatggctttcttccacctgacgcatattcttccgggcgatagcgccctggttgagctgcagggcgcgattgccaaaagctatagcagcaaaggacaggatctggttgagcgtaactggcaggcattggctctggcgcaggaatcgctggcggaagtgccgttgcaggcggttaatccgcatagcgcgcatcgcccgccggtcgtctccgacgccgcgccggatttcgtgaaaaccgttaccgccgccatgttggcgggcctcggcgacgcactgcctgtttccgccctgccgccggacggaacatggccaatgggcaccacccgctgggaaaaacgcaatatcgccgaagagattcctgtctggaaagaggaactgtgtacacaatgtaatcactgcgtcgctgcctgccctcactcggcaattcgtgcgaaagtcgtttccccgcaggcgatggagaacgcgccagccagtctgcattcgctggacgtgaagtcccgcgatatgcgcggccagaaatatgtgctgcaggtcgcgccggaagactgtactggctgtaatttatgcgtagaggtctgcccggctaaagatcggcaagatccacagattaaggcgattaacatgatgtcacgccttgagcatgtggaagaagagaaagtgaattatgacttcttcctcgacttaccggaaatcgaacgcagcaaactggaacgaattgatatccgcacatcgcagctcattacgccgctgtttgaatattccggcgcctgttccggctgcggcgaaacgccgtatattaaactgctgactcagttatatggcgacagaatgttaatcgctaacgccacggggtgttcctctatttacggcggtaacttaccctcaacgccttataccaccgatgccaacggacgcggcccggcatgggcgaattcgttatttgaagataacgcggaatttggtctcggtttccgtctgagcgtggatcagcaccgggcgcgcgtcatgcgtttactggcgcaattcgccgatcgcatcccggcggaattaaacgatgcgctgcatgccgaagcaacgcctgacgttcggcgtgagcaggtcgccgcattacgccaacatctgaaatcggttgcgggcgcagaggaactgttaaaggatgctgatgcgctggtagaaaaatcaatctggctgattggcggcgatggttgggcatacgacatcggctttggcggtttagaccatgtgttaagcctgacggagaatgtcaatattctggttctggatacgcagtgttactccaatactggcggccaggcgtcgaaggcgacgccgcttggcgccgtcactaagtttggcgaacatggcaagcgtaaagcccgtaaagatcttggtgtcagcatgatgatgtatggtcatgtttatgtcgcgcaaatctcgctgggcgcgcagttaaaccagacggtgaaagccatccaggaggccgaagcctggccaggaccgtcgctgatcattgcctatagcccctgtgaagaacatggctacgatctggcgctaagccatgaccagatgcgccagttaacggcgaccggtttctggccgttataccgctttgatccccgccgtgcggatgaaggcaagccgccgctggctctggactctcggccaccgtctgatgccctggcggaaacgttgcttaatgaacagcgtttccgtcgcctgaatgcgcaacagcctgaagtagctgaacaattatggcgagatgccgcattggatttgcaaaaacgctatgactttcttgccttgctggcaggaaaagcggaaaaacccggcgcagattaaaaaatattctaaggattaacctggaaacaaaaaaagcccgaacatccgttcgggcttgtcaatttatacgctggaaagcaaaggttaacgcaatggcccagcgacaaaatgaatatgtgacaataaaggcatataacaggcgtagaatatcgtaaccgaatgatattgtataatttttattttgtataatacccccaaaagcattcgtataaattatatctatttcactgcgaattatttcattaattattgaattaaacggtaacatctctttttaggtctttcctgacaaggcagaaataacgttttaacgtcaactcgctgattatttacgtggaatacgcgtaatattacgtcgccctcccctgtaggtagtccccgcagagtatcgtggagcagcacctaaaatgtgacgtatgtcattgtacataaagtgcctttagggagtagaatttcagtggatacttaaacaggaggttttatgaacagaacgattcttgtacccatcgatatttcagattcagaattaactcaacgcgtgatttcgcatgttgaagctgaagcaaagattgacgacgctaaagtgcactttttgactgtaatcccgtctttgccctattacgcttcactgggactggcttattcagcagagcttcccgcaatggacgatttgaaagccgaagccaaatctcaactggaagcgattatcaagaaattcaaccttcccgcggaccgcgtgcaggcgcacgttgcagaaggctctcctaaagataagattctggaaatggcaaaaaaattaccggccgatatggtgattatcgcctcgcatcgcccggatattactacctatctgttgggttccaacgccgcagccgttgtgcgtcatgcggaatgctccgtactggtggtacgctaaatacccgagcccgcataagagagtgcgggctcaaatcaatcatcatcgcctagtgactgacactttttgaaaacagattgattacgattacgccgcagatgataagcaacatgccaataatagccggcacatccagtttttggccaagaaacaaccatcctatcaatccaataagaacaatccctaccccagaccaaatggcataaatgatacccgcagggatggttcgcattgggatggtaagacaccagaacgcaatacaatatccgatgatagtaacgaggctcggtaccagacgcgtaaaactatctgataattttaatgagatcgtggcgataacttctaccacgatggcgataaatagaaagattacagcttctttagtcatacatctcttcgttccaatatttttcgggtcgtgatgatatcttaagtaatacggatgacagaataaagacgcttttgaaccattgcatatcttgccataaaaacgtgctggcattcgtcgccgtaatccgtaccatacgcgacatacttttgcctgctggctgttgacggcaggagcgaacccggcatttatcgccagccaaatggggcatgaaactgcgcagatggtgtatgaaatttacggtatgtggattgatgacatgaacgacgaacaagtagcgatgttgaatgcgcggttatcgtaattgcaaagtttgcccccaatttgccccatttagtaccagagaactgaaataatgcaaaaaattcaaaagaatacaaagaaagagcaatacaacctcaacaagttgcaaaagcgcctgcgccgtaacgttggcgaagcgattgccgattttaatatgattgaagaaggcgatcgcattatggtttgcctttctggcggcaaagatagctatacgatgctggaaattttacgtaatttgcagcaaagcgccccgatcaatttttcactggtcgccgtcaacctcgatcaaaagcagccaggtttcccggaacatatcctgccagcctaccttgagcagctgggcgtagaatataaaatcgtcgaagaaaacacctacggcattgtgaaagagaagattccggaaggaaaaaccacctgctcgctgtgctcgcgtttgcgtcggggtatcctgtatcgtacggcgactgaactgggcgcgaccaaaatcgccctgggccaccaccgcgacgatattctgcaaaccctgtttctgaatatgttctatggcggaaaaatgaaagggatgccgccgaagctgatgagcgatgacggcaaacatatcgtgatccgcccgctggcttactgccgcgagaaagatattatccgttttgctgaggccaaagccttccctatcattccttgtaatctgtgcggttcgcaaccaaacctgcaacgccaggtgattgccgacatgctacgcgactgggataagcgctatcctggacggatcgagacgatgtttagcgccatgcagaatgtcgtgccgtctcacctttgtgacactaacctgttcgatttcaaaggaatcactcacggttccgaggtcgtcgacggcggcgatttagcgttcgatcgtgaagagattcccttgcagcccgctggctggcagccggaagaagatgacaccgccttagaggcgttgcggcttgatgttatcgaagtgaaataatctgcaggcgtctcagcactccgctgagacgccatgctatcgatcattttaatagccgtacccggcatgacttgcctttgatcttcccgttttgcaactgcttccaggctttttgcgctactgcttgacgtacggcgacgtaaacgtgcattggatgcacgttaattttgccaatatccgccccgtctaatccaatatcgccggtcagcgcgcccaaaatatctcccggacgcattttcgcttttttgccgccgtcaatgcatagggtagccatctctgcggccagagggagtaacggctgccgggcgggcgcattcagccagttcagcttgagttgcagcatttctgaaagaatattcgcccgctgcgcctcttccggcgcgcagaaactgatcgccaggccgctgcttcccgcgcgcgccgtacggccaatacgatggacatgcacctccgggtcccaggccagttcatagttaaccaccagttcgagcgatttaatgtctaaccctcgcgcggcaacgtcggtggcaaccagaatgcgcgcgctgccatttgcaaaacgcaccaacgtctggtcgcggtcgcgttgttccagatcgccgtggagcgccaacgcgctttgtcctaccgcattaagcgcatcacaaacggcctgacaatcttttttggtattgcaaaataccacgcaggacgctggctgatgctggctaagcaacgtttgtagcagcgaaattttttcatgcgcagacgtttcgaagaactgttgttcgatagccggtagcgcatctaccgtatcgatttcaatacgtattggctgctgctgtacacgaccgctaatcgccgcgatggcctcaggccaggttgctgaaaacaataacgtctggcgcgtcgcaggcgcaaagcggatcacctcatcaatggcgtcactgaatcccatgtccagcattcggtctgcttcatccattaccagaatatgcagcgcatccagcgatacggtttctttttgtaaatgatccagcaggcgccccggcgtcgcgacaatgatatgcggagcgtgctgaagcgagtcgcgctgtgcgccaaagggttgcccgccacacaaggtcagaattttggtatttggcagaaaacgggccaggcgacgtaactctccggcaacctgatccgccagctcccgcgtcgggcacagcactaatgcctgtgtctggaacagagtgacgtcaattcgatgcaagagcccaagaccaaacgccgccgttttgccgctaccggtcctggcctgcacacgcacatcattacccgccagaatgacgggtaatgctgcggcctgaacaggcgtcatctcaagatagcccagctcagtaaggttattgagctgggcggcgggcaaaacattcagggttgaaaaagtggtcacaatttactctcgcggtaacgactcatagtcagcaggcgcgtatcctcgcagatccgggcgtttgatgcgacattttaatcggttcttcgtccggcggcgggtcgggcatcggctgaggacggggaagcggctcaggaatgggaacagggtcagtgggaatcgggtccgacaaggacgagtgtagatataataaggtcaaaagacagctcatattaccctccagaatgtcattcagactcttaaagggtagacgcagatagtctacaggcaaaaaaaagccgactaatctaagtcggcgtcgtacgaatcaattgtgctatgcagtaattcaaaaaaggaagtaagacaatatggagcgcaacgcccatcgcttgacgttgcattcacctgcgagagagatattgccccgaataggtagatggtttattgacttcgctcaaatttctcggcgttttttcacccgaaatggtctgaaaagcgcttttgttacaaccatttactgcgatgcaaccataaagtaacaccaccgatcaggacaactaacagaatacaaaacagagaaaagccgaaccgccatccgccgccgggaataccgcccaggttaacgccaaataaccccgttaagaaggtgctgggcagaaaaaccatcgccataagcgacatggtataagttctgcgcgccagagactcctgcatcacctgggcaatttcatccgccatgatgccagtacgcgcgatacaagcgtcaatttcatccaacccccttcccagcctgtcggcgatatcctgcattctgcgccggtgatcgtcgctcatccacggcagccgttcactcgcaagccgggcatagacgtcgcgctgcggcgccatatagcggcgcataacaattagctgtttacgtagcaatgcgaggaaaccgcgcggtgggatttgctggtcgagaagattatcttccagatcgataattttatcgtgtagctcttcaataaattcactggcgtgatcggttaacgcatcgcacacatccactaaccagccgccgcaatctacgggcccggtgccctcctgcaaatcactgaccacatcgtccagcgccagaacctttcgctgacgggtagacacaatgaatcgctcgtccatatataaacgcattgccactaattgatccgggcgttcgtcagtactgccattaatacagcgcagcgtaatgagcgtcccttcccccatacgacttacgcgcgggcgcgagctttcaccagccagcgcatcacgcacgttattggggagtaaaggcgttgaagccaaccagcgggcgctgtccgggtgggtataattaagatgtagccaacagggatgctgactatcgatcacatcattatcttcgagcggttttactccaccacgaccatccagtagccatgcgaaaacggcatccggcacgttcacatccgatcccttaatggcttccacagcgcctccacgttacaactctcatgccgttagtctagctttcgggaaaggttaagcaatctctcattttctcattgcgcaaaaagaatgacgggaacgtgcgaaaaaagcgccttagcaacaggcgcttaccaaacatgtattatcaggcctggccgcgcctggtgatggtcgaaagagatgatacatgagagtgcgacagcgcatgttcactgtaacccggctggcttaaacgaaatttgtcggttttagtctgtaactcgatcacctgcgcctttaaaacatccgaagaagcagatagcgcttcaaccattaagacattgctatgggttgcgctttccagatcgctcaacgccagggttatctggttaatgcctttttcctgctcccgcgtggtggtggaaatttcactcatcagcacgtttaattgcccggagccgccaacaatctcctgcatatttttttcagcctcctgcactatggcggccccctgccgcacattgtcatgcgtaacgtcgatcagcgccttgatactttttgccgcctcggcgctacgatgcgccagattacgcacttccccggccaccacggagaaaccttttccatgatcgcccgcccgtgcagcctctaccgccgcgttaagcgccagaatattagtctggaatgcgataccgtcaatcaatgaaataatctccgtcatctgcgaggcacagtcggtaatagaacgcatattttctgtaacccgcaccattaattcaccgcctttacgggcgcattgggttgcacaatccgcctgtatgctcgccattcgggtattatccgcattgtttttggtactcgccgccatttcatctatactggcggcagtttgaattaacgaggccgactgctgttccgtctttacggatagcgacagactgcgcgccgccagttgttcggaaagggtcattgccgtttgcgaagaggatctgatttcacgtaccaacgcggaaatattctccgacaggctattaataccggggatgagtcgcccggcgcaattattgccaaattcggagatatgaatagacaagtttcctgctgcgacctcttcaatacttttcttcacggtattaatcggcactaccagatagcaggtcatataccaccaaagcagtaatgccgagatcagataaatgatattacacgtaattaaaatagggagatcgtgcagaaaagctatttgtaaagtatccaccaaaagaaacgcacataccatgaatagaataatgcatgtcctgacgctgatatttatcaacatttttgacggcctacaaccaggataggagacaggttttatttttatagcatttcagatacctattgccattcgtttctgtgacattctccatattcaataccagaccatcgccatttcccttagtgcaacagataaaatcatctatattcgctatgccaggatattcatccatccatattgacaagtgatgtacttatcaccattttctgcttaatagttaagtcgaaagccagtatattttaatagacgcttaaataagcgaatgactgtttctccgtgttattaccgcggacagcgttatcgcccgttctcttgcagaatcctgagcgtttggatgaggcgttatatcaggcataaaatcgggttcgcgcgagcttgcgctggcggtcctgtccgccagcggcaacgatttaccgactacgcttcgcatggcgctcccagttatcctgtttagcctgcactgttttacgtaacgcgacataacatgccccgccgccgccatggtgcggcagcgccgaacaataagcctgtacatcttcaaactctgtcaaccagcgggccacatagcttcggacgatattggcatgcgacttcgcctctcgccctttaccatgaatgatcaggacattacgcaacccctctttctgcgcctccaggataaaacgaaacagcatttttcggcacgtttcgaccggctggcgtaacaaattgaggctggcctgctgagggtatttcccactgcgtaacttgtcgatgacaccctgctgcaatccttcccgacgaaattccagcggttcattcagcggcagaatatccagaaagcccgtcgtcaggaaattatcaagctgaagcgtgtcgatacgctggggcgttttaagattacgcgttggctgccagtgtacatcagtatggcgtttcagcggctggacatcctccatggcgtcaagaaacagcgctttatcgtcaaggttcatggttcatcctccagcgtttttgcgactgccgttatcataaccgtgccctgttataccgacaacggtttacagttatttccaataacagcgacaatgtcaggcaattaaccgcctcgccaggctctctttttctccgactacgatattactgtcgctaaatgtgttatccctgactatcttttaaggagtatggttgcgggtattcctggcatgatatcttgtctcttacgttagattaagacgatgtgagagaacggatgctgagattacttgaagagaagatagccacgccattaggaccgttatgggtggtttgcgatgagcagtttcgactgcgggccattgagtgggaacagtaccgcgatcgtatggagcaactgctaaatatccactaccgtcacgaaggctatgaacgcgtttctgcgactaaccccggtggactcagcgataagcttgcagattattttgcaggcaatctcgccgtaattgataccctggaaaccgccacggggggcacaccttttcaacgggaagtatggcaggcattgcgcgctatcccctgcgggcaggtgatgcactatggtcaactggcggcgcaactgggacgaccgggcgccgcacgcgcagtcggtgctgcgaatggtgctaaccccatcagtattgttgttccctgccatcgcgtcatcgggcgtaacggcactctgaccggatacgcaggcggcgtgcagcgaaaagagtggctattacgccatgaaggctatcttttattatgaatatacaggcaaaaagtgccttatcggtcacacttttatgtaaagcaacaacaaataaattacgtgttttcaaatagataaaaatattcatcaaacttatacttgaattattccttctccgggatagctcagacttacgcgctcaccaaaaagatgttaaaattgacaaatatcaattacggcttgagcagacctatgatcccggaaaagcgaattatacggcgcattcagtctggcggttgtgctatccattgccaggattgcagtatcagccagctttgcatcccgttcacacttaacgagcatgagcttgatcagcttgataatatcatcgagcgcaaaaagcccattcagaaagggcaaactctgtttaaagcaggtgatgaactgaaatcgctctatgctatccgctccggaacgattaagagctacaccattaccgagcaaggcgatgagcagattactggattccatttagcaggcgacctggtgggttttgacgccattggcagcggtcatcatccgagctttgcacaggcgctggaaacctcaatggtatgtgaaatcccctttgagacgctggatgacctgtccggcaaaatgcctaacctgcgtcagcaaatgatgcgtctgatgagcggtgaaattaaaggcgatcaggatatgatcctgttattgtcgaagaaaaacgccgaagaacgtctggccgcgtttatttacaacctgtcccgccgctttgcgcagcgtggtttttcaccgcgtgaattccgcctgacgatgacccgtggcgatatcggcaactatctgggcttaacggtcgaaaccattagccgtctgctggggcgtttccagaaaagcggtatgctggcggtgaaaggtaagtatattactattgaaaacagcgatgcgctggcggccctcgccggtcatacccgcaacgtcgcttaaacgtcagctaaaccattgatgttatcttctgccatatcgttaaatttttctcatttattgatctggcagaagcgcttcctctgtttcattcaccatatttgagttactctttagttacaaactgcgatgacagttgtaaggagaccctgtatggctatgtatcaaaatatgctggtggtcatcgatcccaatcaggacgaccaacccgcattacggcgagcagtttatttgcatcaacggattggcggcaaaattaaagctttcctgcctatttacgatttctcgtatgagatgaccaccctgctttctcctgacgaacgcaccgcaatgcgtcagggcgtaataagtcaacgcacagcctggatacgtgagcaggcgaaatattatcttgaagccggtgtccccattgaaattaaagtggtctggcacaatcgtccctttgaggccatcatccaggaggttatcgccggcagtcacgatctggtgttaaaaatggcgcatcagcacgatcgactggaagcggtcatttttacccctaccgactggcatttgctgcgtaaatgcccaagccccgtgtggatggtcaaagatcagccgtggccagagggcggcaaagccctggtcgccgtgaacctggcaagcgaagagccctatcacaatgctctcaacgaaaagctggtaaaagagaccttacaattggcggagcaggttaatcataccgaagtgcacctggtcggcgcctaccccgttacgccaatcaatatcgccattgagctgccggaatttgatcccagcgtgtataacgacgccatcagaggccagcatttactggcgatgaaagcgctgcgccagaaattcagcatcgatgaaaaagttacgcatgtagaaaaaggcttgcctgaagaagttatcccggatcttgccgaacacctccaggcggggatcgttgtgcttggcaccgttggacgtaccggactctcagccgcgtttctggggaacacggccgaacaggtcattgaccatctgcgctgcgacctgttagtcattaagcctgatgagtatcaaacaccggttgaactggacgacgaggacgattaatccctcttgcgtcctgccggatggcgctgccatccggccaataccctattcctgttactcatctccgccgaggaaatagatccccaaaggaatcgccagcagaatagtgaacaccagactgtaaacgaaaatcattgccgactgaatggcatacatagagcttgtccactcggacagtggaatatgatactgctcaatcacaccgccgatagtcgcgcgcgttaccaccgatgccgcaacgataaacactgccagcaggcataacagaaattttttccccttcgccgatttcagcttcatcatgatcatagtattgtcctttacagatgacttttttacctgatagcaacaataccatgacaatcgcgcgatgtctgctctataaaacgtgacattgtatttacataaaaagtaaaccgctgagattaaagctgatagcactatttcttctttttacttatcgatgatctacgcgtttatcctgggtaaaatacctgttaatcaggtcattctgagctgttatcgtaggaaggagcggaaaacaataatgttcactgaattttttctcaaaaacgcatttaatctggcgatacttttcagttgcggtatggcgttgctggtcgtgagattttggctcagccgtaacgtacagtggaagaaaggattcacgttccatgcggcacagttttttatttatgcaattattattgggaccatcgggagcatcctgaataatgctattgaagattataatttgcgttttatctcttccggggtcattgattttatctgcacctcgctcattgcgcttattctgacgataaaacttttcctgattattaaccaatttgaaaaagcacaggtcaataaaggtagagatgtcaccagtacccgtattctggcacgggtcataaaaataaccattattgtcgcgattgtcttactgtatggcgaacattttggcatgagtctgtccggtctgctgacctttggcggtatcggcggtatcgctgttggtatggcgggcaaagatgtcctgagcaattttttctccggtattatgctctatttcgatcgccccttcagtatcggagactggattcgttctcctgacagaaatatcgaaggtacggtcgccgaaatcggctggcgaattacgcgaattaacacattcgaccaccgcccgttgtacgtgcctaattccgtcttttcatccattagcgttgagaatccgggacggatgaccaaccgtcgaataaaaacggttattgggttacgttacgaagatgccgacaaaattggcctcattgttgacgctatcagaaacatgttgcaggcgcacagagatatcgatcagaaacagacgctgttggtctattttaatgaattcgccgactcttcgctgaatattatggtgtattgctttaccaaaacaacagtatggcaggaatggcttgccgtacagcaggatgtttacctgaaaattattgcgattgtccaggaaaacggcgctgacttcgccttcccaagccagacgctctatatcgatgacccggaggccgcgcctgcgacaaaataaaagatagccggtgcccgataagtgttatcgggcaccgaggcttccctgtccggatggcgggttgttagcgccttccttacggtgatcaacggctcttttcattcaccgtcatggtaaattcaagcacctcattagtgtcgttaacgtaggcatgaggcatgtcggttctggctacagcggagcagccctcccgaataataaagcgtctaccgtcgactgttaatgtcagtgttccctgattaacaaacagtaattcacaggtgtctgccggatgccctgccgattcaaactgttcaccaggatgcattatccattgccagagttccagcatatccggcccgctggttcccgccatcagttttgcgctgccgcctttctcgccgcgccacaacaccggaatagcatcccggtcgataagatggaccatcggctcgctggcgacgttgacaacatccgccacggacactcccattgccgccgcgatcttacataacagcgcaatgcttggattggctttacagccttcaatttccaccagcattcctttactgacgccggaacgccgcgcaagctcatccagcgacatctttttttggctacgaaattgtttgatacgttgggaaacagcttcatttattgtgctgacgtcggcgcccgccgtggtcgataagttgacttttttggtcattggtcgatatcatagaataaaatagtcattacaggattatgcgatgtcttctatgttaccgtcaatcagcccggaactggcccgtatcgctcccggctttcgtgcattaagtattaatgttattgccgctccgattcgcgatgcgcaggtcggagaaatcgcgctaaaagaggcctgtcaggccgtaattaacggccaaccggcgtgggcacaggcgcatatagacgcctggaatacggtgcttaaagcattcggcgcaaaaccaaagcgcaccccctgctcggctgaagcgctacgaaaacgcgtgttgaaggatggaacaatggcggcgctggatccggtcgttgatctttataacgcggtgagcctgcgctatgccgtaccggtaggcggcgaaaatagcgcggcttattgtggatcgccgcggctggttttcgcagacggtagtgaaacatttgatactctgaaagaaggacagcccgccaccgagtcgccagaaccgggcgaagttatctggcgcgatgacagaggcgtcacctgtcggcgctggaactggcgtcagggagtacgtacccgactaagcgcttcagataaagcgatgtggtttatccttgaaagcttgccggaaatgccggttgatgaattgtacgcggcaggaaacatgctgactgacggccttgaaaaaatgatgccaggtttacgttttgaatccacgttgataggtgtttgattgatattgcgtaacaggagaaataccatgtcgctgtttctgacaagttttattttcgaaaaaaaagagtacgacgaagagttttatcaactggatggctgaattgagcgctatacgcagtctgttgatggctatattgggatggaaagctataccgatgccgccagcggaagaatagttaacaattattactggcagacccgcgaatcaatggagctattgataaataatttacagcaccagcaggccaaatcacaaagtcataagtggctttccggttaccagacgattattgcagaaattcaggggtgccataacgttaacctgccccatccgctggcatcattttcagttccttatgcgtaatgcaatagtatatatattaaatgtgagggcacacaagagaatgcctgcgcccctgcattgccggttattcggttctctgtgcaggggcggtgctgatataagtgattagtaaacaggaagatgagtgatatctcgtggtacactaacacgcgtaaccacattgttttcatcgcactctatcaacgctctggcaaaaatactgagctcattaattttcagcccggaattatccaaaaactggcggcaagcgtagtcagaaacaaaaattatgccgggatgaatatcatgttcccgaataaaacgggcctgagcaaatggcgtatccatactcagcacatataccgcccgggttgagtggctacccgctgatttaaggcggtcactatagtcttttacctgccattcacaaactggcgtatccagtgacggaacgacaataatctgcttttttatccccgggatacagtaacccggtaataaattatggctcaccagcccctttgtgcagggtaatggttcgccttcagccagtataccgggtttgagggtcagttgcgttttgccaaaggtgacagcgtgttcctgacccaatgagatataatcctgtgttgttgttggcgtcataaaaacttctccttttaacgtttgtattattttagccataataattatttagcaatccgctaaaaaaccaggtgaacatccataataagatgatggtgataaaaagaattatattagacataataattaatatagttttatagtcttcctctgatggaaatttctttcgtgaaactcattgcatatttaaaagatatgtcaatacgttcattactatgcccacgataggttataacttgtgtatatttacctggaacattttctttcttaagagggccataatcccataagccttttaaattttcacgcgctacagtcttattaatgtgaacttcatttacaggattcccgtcgatatccttaacaatagttgtgatggtggcactttcacccggcgataatacagacttatctatactcataactgttaaatctgggcttggcgtattagatatagtttctgtttcaatatactggaactcagataccgatggcacaggcgtgtaccctgacgctgaagccatatccgtttcattataaatttctagtttaatctttgaaccccgatgttccttttggatattaaatttatgctcacatggcttttctcgtttaagtatatgctgagagttatctttattgatctgataatacgtacatactgtagtaaaagtttccgcagactgatagttattatccggatctctgatgcctacatttctggcattcctcgcaatagtcattcccggaaaaggtgtatacttttcaataaaaaagccaagtccattaaactgcaattcgtagctatcgcgaggtgttccaggcctgtgcccaacgctcggcgccgtaggaggagaaaacatcccgacggttgccgcggacgttgtcgacgaatccgccaagacgcttatcggcgcagccgccagaagcaggctatagataataagattatgtttcgacatacgcactgttgatcctttttaaaacattaattcgcatcagaggttgcggtattacccttagcatttcccttatcagaaataattctgacgcggatatatttattctgaagcgattccccattaagactataaggaagaagccaggtggcctttgtcgcacccggtacggattgccaggatttcatttcatccgagatttcccactgataattaaacgcatcagtacagtccgtgttatttacacaaagcgttctggctcgcatttctgttccgacgactggcgcagtaacgcttccgttggcctcttcagtacccggcgtaaaaagcacctccacagaagtgaccttctgcgcaatactgtctgactgcgcttgtagtagtacggtacccttcaccggatgtttatcgtctggtccgcttgcttcaatatgtaatttgagcgagcgggcatcatcgccgatatgggtcaccagaacccgttcaacccaatggccgtcacgctctgtaccaccgagcgctttaaatgccagacccggcgtatctgattgatacttaatatgacgtggtttgagcgacgcccactcctcttcagaacgctcgcgcacgtagtgccactcaataaccttcccctcttctccggcaggaagcggcgtattgatgacaaagttgccgtcctcaacctgaacatcgtcattgataacatttatccaggaacggaaactggtctcatcctgtgtcacccttaccgggatacgctcggaggtcacgcgagtaccccggctgtcagtcaccgttaaataaaggctatactcctgaccgtcggtcgccgtcagcggaagttgtggaaggataaggccgctgcccagactcccctgaagctggagtccggcgagaagctccgcatcacccgaccactcaaccttctcaaccgggtaacggctatctaccgtcgccattaatgtcaccagcgtcccggacaggcctgacaccggcattgccgtaatgcggattttgctggcctgctcccgatacgccatgacgatatcgtaattacgatcaacaaaggcacgccggttagtcgtattcgacggcgccccaacgttgcggtaatcaagctgttcatgtaacggcgtaccgaaggaataattgactctcagaccgccctctgcctgcgagccgccgttaccggcgtcccgatatcctgctctgacctcaagcaaggggacaggattccagaccagagccgcacctgcggcgcggggattccggcttaatgtaccgttacccaatagatcaactttatccccgtaatactgttcatatgtcagctctccactgaaccagggaaaatcggggagcgtgccttttgttcgcagatcaaagccatatgccggacgctcatcatgtaattcatgcgctgctgacattttccagccggtgagagggaaataatagttgccggaaaaggccagactgtctttatagacttccccgccaatgccgccacgcaagtgggaataacggatgtcggcatccagaaacgtattgacgccgagcagccatccattgacctcctggcggtaacccataccaacgttaacataggtgcggccatcgaaactgctgttgtcgtggtcgcgaaagccaagctgaccaaagagtaaagacgatgttgtttcctggacgggaataaacatatcgaactctgatgagcgatatttcgcgccatcttcaagattgacgccaccacggaaaataatctccggaaaagcgctctttatcccctcgttcaccagatgattagcggcctgccctggtaacgcctttatttttcctttggcataatcctccagcgtcccctcctgcagatgcggagaaatagacgatgccgtccccgcaatccacgactgaatttcattatcgctatcagcaatgaccggcagtggaatctgactggtaacaatggcccaggttatatatttagtaatgggttttttagaaaaaaccactgtattgtctcctgctatatccccctgcctggcagagggagtatttaaataagatgtttatttggcgataaccatcagcgacggatagcgcgtttattctccggcgtggctttcgtcgttttaggcgtaacgtggacacggaacagtttattctgctcagttcccttaataatatatttatgcttttcagcgttggtattattcagatcggtgaacttatctggtgtcccggcatccgccatctgccaggtaaagttataattactgacctcacactcagccgccgctgtggcggcacattccagtaccgcttcaagggtgccgcctaccactggagtgttggcgtcattggtaccgttgagttcatcagtcggtttaccactttcattcaccacattgatagtgacagaacgtagcttattagaaattgtaccgtctgcggcggagtcgccgctcaccccagaagatgcagaagttaataagacagtggcaggcaagaatgcactatccggcgtccccgttgccgtcttaatccggtaaacgattttaatttttttaccgcctgcatcagcaggaatggtaaaagccgtcccggttgccgccggggttccagaaggatcggcggcctcattatccaccagataccatttaatatcgtcggcattattcattttatccagcgataagggatccccatcctcatccctaataaaaacatccgctatctggagggttgaaccggtcgtcagttccccagacacttctattttttttgcattagtagttgccacaggacggtgaccaacagaagcaggtgtagcagaagaagccatatcattggctctggtattcgccaccgcctctactgagaccacggatgcacaaattgctaacgttaataaagatcttttgaagtacaaaacaattcccttttattaaatcattagaaataattacgagatttataatctcacgggctaaaaattcagggttattcaatcattttaaccgcctgtgaaattatgcccttcgccatgctaattacttagctttactggcaaaatccgatctccaagtgtaaagtttattcagaaacgtcaagcaatttaaatctttcttgttttgccagaaaagctaacaaccccccactggtttaataacacagtatatcaaacaccttaaatgtttatattttcggcttcaataaagaggaatgatgatgaaaaaagccataataatctcagtattagagcaaatagaaaaaaaatcttgaagagaggattgatattgaaaagctggttgttataacaggttattcgcgaaggagtttgcaggatttttttaaagaaaagtgtggcgtctctatcggaaaatatatcagacaacgcaagttgagcagaagcgccactctgctaaagctgacctctcagtcggtcacagatatcgcgttcagaatggggtttgattcagtgcagtcctatagtcgagagttcaaaaaaacatttggcgtcaatcccaataactatcgcaaggctgatttctgggatctcagaaacctacggcctccctactggcttgactgtgatgagcattatcagttcgaaatttgtcagcttacgtcaaaagaaattttcggatttcaaacgtctcatcagatcgcaacaaatgaccttcctaaaaaagcgtcgcctataaaatggaaaatcattcatgagacgctcagaacgtggggcgaaaatgtgtattgtctctcgtcttttaagccggataataccaaagaccaggtcatcgccgtaagcagtttttttggtatggaacataattccgtcgatggaggaaaaatacccatgtcgagggtaataaaatgtggtaaatatgcaaaattccattttgttggtcataaggaacaatatcaacaattttccaatacaatatatatgtgtatattaccaaaactgaatcttatcaggagagaaggagaagatattgaatacttccatttggcatccgtccaaaagcaacagaataatgaatccattgtcgatctttattattacatccctgtactgtaatgacttcgtaccatccacgcatttcatctgaaaagtcttctcttttcagaacggtaataaaactctcagtattgattctggtaaaataagtgactattaatatagttaacgttttgaaagaattgaaaaaaataaattgcgtgcacgcgacaccggagacagattactgacagtactgtacggtgtagtgatcaggtaatattggctacagtttacggtaaaagcaaagtccatactttaactattaatgggagtatgctggccgggcggcttgcggggccttcatgctcccacatttacaatgttggtatgattacattctctctatactttactgtgctaaccttttatctcgttgagataacgtttaattaaaatgctctctttttgatgtacattataagaggagacattattcatattttcgaaatcagggcagacgatatgtatacaaccatcagaaacacagcgctagcaatggtagcttgtttttcgtatatcgcacatgccagtacccaccctcctcttattatcaccaggggagccggaggagacgcctccggagccacagtcattcatgataattggcggcatggcactcctgacctggtcaatcttaccgatatccccatagataaaatcagaccagaaaaatacagttgcatactgattattgggcaaggagctataaaagagatgcttcttgcgaacaatgcctcagcaatactttccggaaaaacggttggtctgtatagtcatctgatcgatcagaacacgctcagattacttcggcaattgcagaacaaagtgagattcaatctcttttttacccgctcgcagataactctactaaaactaaggaatatttcagaatataattttttgagttctaaagtaaataatgtctggggacaagactcactagcaattgaaacagtggcacctgacaggggtaatataccggaaaaagcgcttcccctcaaaacaacagattatgtgatctggctgggtggaaactatactacttcctctggtacgcagcgtatcttcacaaacgatcagattgttgtagccctgaaaccactacataatgttatttcatcaaatgcatcgattgctattatgctttcaccacgtttttttgataatagcgtgagtaaagaagcaaaagttaaacgactgaaggcagtgcttaacaccttttcgcgaaacagggtcacattttatatgagtaaggagatgcttgctaatctgaaagaatttgatttgccagttcaactatccccttcttacgcagagctgatgcgaatgccctgggccagcgctacccggcattttgcctctgtggatcaatataacctgtttgctgatctcatacctaaagttacgccgtttcttcttgaaccgaatgatgccgatcaagctctctatgcgacggattatcttaatacccggcgtgtaagtctgacccaaaatattcttaaccacggttgtgactaaataaaacgcgcagaatccgggatagttagcaatccaaaacagaccgttagccatgagtactgtttatcttcactatacagggaacaaccaaataactgacaacacaaatcaagccgagacccggaattcggctatacaggcgctctattcaattcaggcccagaaacagtccggtacccatactggacacggcctcccaactgctttagcgcattaccagtccagcttcgatgcgccttctgtcgtctgcactatttcactggttttcataacgcgatgataaccataaacatcagcgtatttcgtcattccggttgcggtgtcaacctccggcttaccctgcgtttcaataatctctcccgtccgggtcgtcatggtataggtcgttgtacatccggctagcatcaacactgataagctaagtaccgtaataagactacatttttgcatttctcgtttccctggcacctctatttttgatgtactttaccgaataccgcaacggcaagatggatgattagggctattgctccctgtttgtccgtatctgactggctcaggttttttgatgcgctgcgttaatccggcagtaatcgctccagcacatccccagccagaagcacgctctcctgaagacgctccaggccataccccgctcgcgccttggcggaaagccccgccattagcgtccccataaagtccgtcgtccggtcagcctcttgcggataccgcatggcgacataagtgcgaatcaggttttcagcagcgatgtaaaactcgcaggcggcctctcgtgccggtttatcgttacaatgagcgccctccagaaccagacacccagtggcatcaggatcggcagcgtaacgtcttgccgcttccatcagcacatcgataaggcacttcgcggtcgggcgatcgtgacgcagaagcgccccgagcggaatcgcgtcggtcatcctgtaacgctttaatacgcgagtatacagccccaacttgctaccaaacgccgcatagaaactgggaggattgatcccgaacgcttttgtcagatccgctacgctcaccgcgtcgtagccgcgcgaatgaaataaatgttgagcggtttcaatggcttgctccggatcgaactggcgagggcgacccggcgttcggctatgttttgtagtcattactacataactccttgacggcatgatttcattacgcatattgtagtggctactacaatatcataaaggacatcctgatgacgctatttcgcaacaaatctgtactggttttagggggaagtcgtggtatcggcgcggctattgtacgacgctttagcgctgacggcgcatcggtcgttttcagctacgccggatcgcgtgaagccgccgaaaaactggcaacggaaaccggaagcatcgccatccagacggatagcgccgatcgtgatgccgtcatcagcctcgtgcgtgagtacggaccgctggatattctggtcgtcaatgcgggcgtcgctctcttcggcgatgcgctggaacaagatagcgatgcgatagatcgtttgttccgtattaatatccatgcgccttaccatgcgtcagtcgaagcagcccgcaacatgccggaaggtggacgcattattattatcggttccgtgaatggcgatcggatgcccgtaccgggaatggccgcgtacgccgccagtaaatcagccctgcaagggctggcgcgcggcctggcccgtgattttggcccccgcgggattacgataaatgtggtgcagccaggcccgattgataccgacatcaatccggaagatggccccatgaaagagctgatgcacagtttcatggcgatcaaacgacacggaagacctgaagaagtggctggaatggtggcatggcttgccggtccggaagcctctttcgtcaccggcgcgatgcacaccatcgatggtgccttcggcgcctgacggccaggcgaatatcacacggttgccgtctacgctccggcaaccgtgttagaagctgttcatgcgagaaaacatccgcaagcgccgggatcaatcgtggattttaacgccaagacaaccgcgaacaaattcaggattaaaatgcttcaccgcttcgccaacgtagcctaaatcaagggcgttgatttgagccatttcgttatccgttagtgagaaatcccagatagcaaagttctcttcaatacgttcctgtcgagtggatttaggaataaccgtgacgccacgctgcacgttccaacgcaggacaacctgcgcgatggttttttgatgggcatcggcaatcccttgaagcatgacattttcatacggtttatgtctcccgccgcctaacggcgcccacgcttcaggctgaacgttataatgcttcatggtttccagcgcggcgggttgtgcaaagtatggatgcaattcgacctggtttaccattggcgtaattctgacggtttcacagaagttggctaacacatgcgcatagaagttggacacgccaatggcttttagtttaccggcttcataagcgtcctccagcgcgcgccacgcgctaaaataatcacccattgcctgatgcaataaatagagatcaaaataatctaacccggattttttcagcgacgcttcaatacctgctttggccagatcgtagttagccatatcttgcacccacagtttagaagtaataaataactcctcacgggtacacagacctgtcgcgatggcttcacgaacagcgtcaccaacggcatcttcattgccgtataccgcagcggtatcgataagacgataaccgctgcgaatagcgcttaacactgactgctgacattcttctttgtcggttaccttaaaaacgccaaaaccaaccataggcattttaaggttgttacttaatattgaatattccacgctaaagcaccctttcgtcgtaaagacgccatgataagagcaaaatacaggtacaatgagtattgttaaatacgattatatttatacaaaaagttcattaataacagttgtacagattttttattgcatctaaacgttcagtgcttgctatatcctcgccgtgtagcacctgtttgataatgacttttcttatgcgtcaaaaccagtaccgtcattttgaccgtctgtgaaaaagttttctgaacaggcaatgcgatatccggaataatatttttagcgaagaggcgccggctggctcagcgccgttttgcaccagtcataaaaagcgcgtaccgcaggcggcagaaacctgttttgcggatagaccagcgcaagcggcaaatcataagaatggttgtccatgcaggtcaccagcgccccgctgtgcagatacggcgcaaccagatagctggcgacgcgaattaaccccagtccctgtattccggcctgaatataagcgtccgtatcatcgacaaccagcgtctcctgcacccgtatcgcgtaatccttcccttcacgcgtaaaaaaccagtcgatggtacgcccggtgcggtggttcaggtagccgaccgcatggtgcttttgcagatcatctaaattttcagggctaccgtaacgctcaatgtaagtgggcgatgctgctatcacccagttaaagctggcaagtggacgggcaaccagcgtggtggaatcatcgatcctgccggcccgaatcacgcagtcatacccttgaaggataatatcctccacgctatcgctggaacaaagtatcagctccagctccggatactggcgcaaaaaggccgggagcgtgggaataatgcaatgtcgggcgagagattgcggcatccccactttaaaacgccctttgggttgtgccgcccggccgggaaatgacgactccatggccgcgatatctgccagcactcttttgcactcttcgtagtaacgccgcccctctgcggtcacactaagtttgcgagttgtacgttgcaaaagttgaatcttaagccaggattccagttctttaaccactcgcgataccgttgagcgcggcacgcccagcacttcggcggctctgataaaactatgggtatccactacgcaaacatagacctgcatcgcttccagcttgtccattttccccccgccaattatcccatttatcagaacagtctaacccgtcttcggcgtcttatcgaacgcagatccctgacgtaatctctatctacaggtgaatcaacacagagaggcgcaaatgaaacaatccaataatcaggtgggtgaaaaagtattggtgctgggcgcgggacaactgggggcgtcagtgctggcgtcgttggttccggcggtcacacagcgtaatggttccgttagcgttattgtgtcagggcgatccagggataaacagagcaaacgacgttccagcattcatcaacaactggcagatgccggtgcgcggtttatcccggtcgacatcgcaggcagttcggttgcagcgttaaaagatcaattccacggttttgatacgatcatcaattgtatggggtttgtcgccggtgcgggtacccagataaaaatcacccgcgcggtactggaggcgggcgttaagcgctatttcccctggcagtttggcgtgaattacgatgtggtcggcaaaggcagtggccagccggtgtgggacgaacagtatgacgtcaggacgcttttgcgcgagcaaaacgtcacagagtgggtgattgtttcaactggtatatttacctcttttctcttcgaaccagcctttggtgtggtcaacttagccaaaaaaaccatcaatgccctcggcggatgggaaatgcaggtcaccgtcacgtcgcctgcggatattggtcgcctgaccactgaaatttatctgcatcagccgcgtatcactaacgaagtcgtctttgtcgcgggggaaacgacctcttatgcaaaactggcggaaacggtcgaacgcgtgacgcagcaaacttttacccgaggcgtattgacgctacctgacttacaggagcaactccgtttacatccgcatgacccaatgctgcgctatcgcgtcgccttcgcgcgtggtgacggtatgtggtggccgatgagtgacacctggaatgcacaacatcatctgccgacacaggatattgccgcctggctgaaaacacagcaatgagaacggcggcatcaggcgctcgcttaatccccatgccttctgccagcatcaggcggcgggcgtggctaccttgcgttaacaagaaaccagtacgcatcagtgcttcacgatatacattgtacggctataggccacatcttccgggttagtaatggggtatccctttacccacggtttaattaaccggccattggtatactgataaataggcgctataggcgcttgttccgttaaaattttctccgctgcattgtaatccgcgttacgcgcttcggcagtattttccatcgtcgcttgcgtcaggattttgtcataagtcggattagtaaagcgtgaaatattccccgtatgcgtggacgttaataaggataagaaagtcgacggttcgttgtaatcacccacccaggaggcgcgaataacatcaaaattaccggtattccggctgtcgatatacgttttccactcctggttttgcaatttcacatccacccccagatttttcttccacattgacgccaccgcaatcgcgattttctgatggttttctgaggtattgtaaagcagggttaatttaagcggcttctgcgatccgtagcctgctgcacgcagcaatgttttcgcctgggcattaagttcttcctggctcatttgttcaaacggtgaaggatcgggcgtaaatcctgccgtgacatccggtgtaaaatgccaggccggtttttcaccggtacctaagactttttccgccatcaaacggcgatcaatggtcatacttagcgccagacgaacgcgggaatccgccgtcggccctttctgcgtattaaacgcataataataagtccctaattgcggcggtgtataaacttgccctggaatatccttcaataatttctggtacatatttttagggaaagattcggtgatatcaatatcaccggcaaggtaacgtttcgtcgcagccgattcctggttaatgggtaaaaatgttactttttgcagtaccgttttcgcgttatcccagtaatgcgtattaggcacgaccaccagtttttcatttaccacgcgctctttaagaacatacgcgccattgccaatcagttttcccggcttcatccagtctttgccgctttcaacattcgctttttggaccggataaaaggcaaaactggcggtcagactggcaaaccagggcaacggcttgtcaagctgaacacgcaaagtgtgcgcgtccacggcactgacgccaagctgatccggcgtgactttaccgtcgataatggcttgtgcattagtgatgccagccagagcggcaaaccaggcgaagggggaaagcgttttgggatcaacgaggcgttgccagctatagacaaaatcctgggcggtcaccggcgttccatcggcccattgcgcatcatcccgcaacgtaaacgtccagatacgattatcattgctcttccactggctggcgacgccagggataatttcacccttttcgttctggttaaccagcccttcaaacagatcgcggatcacctgaatttcaggcagcccaacggctttcgctggatctaacgaagcgggctcatctttgatatgacgcaccagttcttgtttttctgccagtaccgttccgccgggaacatccgcagcatatgccagggaaaagctgctaaccaacagcgcacaacaggttactgaaacagaatgcctcatagaagttcctcaaagatgagttaaatgacaacgtaattatttgtttcagcagaaagaaatgcaattatcttccgccagaaagttgatatcgcgccatacaagagggtaaatagaaaccatttgataatcggcgggttttacacaacactacgatgattaccctactggtctcagcttcgggaaacgcgtatgactgtcacccgcccccgtgccgagcgcggcgcatttccgccaggcactgaacattatggacgttcgctactaggcgcgccgctaatctggtttccggcgcctgccgtcaatcgcgaaagcggcctgatactggctggcacccacggggatgaaacctcatccgtggtgacgctctcctgtgcgttacgcaccttaaatccaacccttcgccgtcatcatgtcgtacttgccgttaatcctgatggctgtcaactggggttaagggcaaatgcgaatggcattgatctaaaccgtaactttcccgccgccaactggaaagcgggtgagacagtttatcgctggaatagccgcgcgcaagagcgtgatgtcgtgctgctaaccggcgaccatcccggctcagaaccggaaacccaggcgctttgccagttaattcatcgactccaacccgcctgggtcgtctcttttcacgatccgctagcctgcattgaagatccacgtcgcagcgagctaggcgagtggctggccgatgcgtttgcgttgccgctggtgaccagcgtaggttacgaaacgcccggttcgtttggcagctggtgcgccgacctcaacctgcactgcattaccgccgagtttccccctgtttccgccgatgaagccagcgaaaaatacttgctggcgatgtcgaatctgctccgctggcatcctaaagatggagttgacccgtcgtaaagcgtagcgcgggctcaacatcaaccgccagccatgttgggccatcaagatcggcgaagctcacctgcggcataagcggcagcgcggcgctaatcgctcttgatgtacagagcatacagcccagcatcaggccgaatccttgctcccgcgcctccgttgccagcgccagcgcctcggtcagaccgccggttttatccagcttaatgttgatcatatcgtagcgccccgtcagggctttcagactactgcgagtatggcagctctcatctgcacagatgggcaacggatgaataaaattttccagggcggcgtcatcctgcgcgggcagcggttgctccagcatcgcgacattcagatccgccagtaactggcaacgcgccgccagcccctccggacgccacgattcattggcgtccacaatgagcgtcgcctccggcaccgccgagcggatcgccaccatacgttcgctaatcaaacgagcatcgagtttaattttcagcaacgtcgcccctttttcccatagtgccgccgcactggctgccatctgttccggcgtgcctatcactaccgtttgcgcggtagtaaaaaccggggccagcgtcacgccgagcagcccggcaaggctttgctgccgctggcgggcttgcaaatcccataaggcgctatccaccgcgttgcgcgccgcgcctgccggcaacagtttctgcaatgcttcgcgagtcagcccgttttccaactgaggcacaatactcatgatttgcgccatgaccgaggcatcactttcaccataacgtggatatggcgtacattccccgatgcctttcacgtcctcttcttccagttcgacaacgacaacatgcgcttcgcttcggctaccacgcgcaataacaaaaggcgtatgtaacggccaggtttcctcatataccttaacagatctcatctcttcccctctgatagcgccggacgcggcttgctacaaatagtatttgccgtgttaatgaataatgacttaaactggatttcgacgttaactataagtaaataggaacataattatgtcacagactgtacatttccagggtaacccggtcaccgttgccaacgttattccgcaggctggtagcaaagcacaggcttttactcttgtcgcaaaagatttgtctgacgtttccctcagccaatatgcaggcaaacgcaaagtgctgaatattttcccaagcattgatactggcgtatgcgccgcatcagttcgtaagtttaatcaactggccacagaagtggagaataccgtcgtattgtgcgtttctgctgacctgccttttgcacagtcgcgtttttgcggcgcggaaggcctgagcaacgttattacgctttccactctgcgtaataacgagtttctgaaaaactacggcgtcgaaatcgttgacggcccgctgaaaggtttggcggcgcgcgcagtcatcgtgcttgacgaaaacgacaacgttattttcagccagttggtggatgaaatcacccacgagccggattacgacgccgcgcttaatgtcctgaaggcataagccagcgcctgctggcgctacgtttgtcagtgctacaggcggtgctcttttgtcacaagaaggcctctatccggaggccttcttgttgtctatggaaaacccccagctaggctgggggttccggaaagctttcagctttaagccagttattaaaaccccttttgatttgttaaaacatcttgcggtctggcaactgcaaaagttcaacaagaaatcaaaagggggtcccaatgggggacgaaaagagcttagcgcacacccgatggaactgtaaatatcacatagttttcgcgcccaaataccgaagacaagcgttctatggagagaagcgtagggcagtaggcagcatattaagaaaattgtgtgaatggaaaaacgtacgaattctggaagcagaatgttgtgcagatcatattcacatgcttctggagatcccgccgaagatgagtgtgtcgagtttcatgggatatctgaagggtaaaagtagtctgatgctttacgagcagtttggggatctaaaattcaaatacaggaacagggagttctggtgcagagggtactatgtcgatacggtgggtaagaacacggcgaagatacaggactacataaagcaccagcttgaagaggataaaatgggtgagcaattatcgatcccgtatccgggcagcccgtttacgggccgtaagtaacgaagtttgatgcaaatgtcagatcgtatgcgcctgttagggcgcggctggtaagagagccttataggcgcatctgaaaaacctccggctatgccggaggatatttatttttctactcttcacccttcttctggctcagaccatattcacgcagcttattggcaatcgcggtatgcgatacccccaaccgtttcgccagtttacgcgtactcggatagctacgataaagctgggtcaggacagaacgttcaaaacgactggtaatgtcatccagcgagccttccatcgcatcctcgccgactgccaccgtcgcggcatcgtagtcaggcagcaggatatcctgcggacgcagctcatacccttccagttgcgtcagcgcccggtaaatcgcatttttaagctggcgaacgttacccggccagccgtaacgagtgaggaccgtactcagatcggcagacagtttcggtcgcggaacgccctgttcgtcggcaaaacgcgccacgaacagttcggtcaacggcataatatcctgcggacaatcgcgcaacggcggcaaattaagcgtcagaacgttaagtcgataatagagatcttcgcggaacagtcctttttgcaccagctccaccagatttttctgcgtggcgcagataacacggacatcaacatgaatttcgtgatcttcgccgacgcgacggaacgtaccatcgttgagaaaacgcagcagcttcgcctgcatacgcggcgacatttcgccaatttcatccagcagcaccgaaccgccattcgcctgttcaaagaaaccttttttaccttccggcgcatggccaaatagttcgctttctaccgcatcttccgggatcgaagcgcagttgagcgccagatacggtttcgctgaacgagggcttgcctggtgacaggcataggcgaaaagatctttgccggttcccgtatcgccggtaatcagcagcggcgcgctgagcatcgccagtttgcgcgcctgctcaacgacgtgcttcatctttgcgctcacggcaataatctgactaaacgcgctcagatcctgcgtggacaaattctgtagctgctgccccatacgaatcgtggaacgcaacatcacgaccgccccggtcaacacgtattcgtcattttcgttttgtaaatgtaccggcgtaatctccatcaggaagttttgcccgttgatcacgacatgttcgttatgggagctttgcgggttaccgtccagccagcgctgaaaattgaagccgttgattaattgtgcggcggtatggtgccgcattcgctcctggctctgggcaaaaagttgacaactcgccgggttcgccatctccactttactcttcatatccaatgagagcaccggctccggcaacgcctcaagcagcgcgctcagggccagatgttcacgttcggacggcatccagggaacggtacggacatccgttacgccggaaatacggcggatttcggccatcaggctgctgaagtcggtgaattccagctcagcaaaattaagataaattcgcccaatgggatcaatctcgattccgcgtaaatcaatgctacgtaacaccagtaaatcaagtaattcgcgggtcagaccaagtcggtcttcacaaaagacttccagacgcatgggaaccttcacctgaataatgaaccattaaatagatgataagccactattcggctggcaggaaggattctgtcaacaaatattgacagcatggcggaaaaacgggcgctgcggcgtaaagccaggccgtcagcgccatgtgaaaggtcatttctcaggcgacgacttactcttttgcagcgtctcttttagctgaccgataagctgacgacgaaaatcaccgagacgtggtttatcgttatcgatccacggcaatggtcgacatagctccatcgcttttattcccagtcgagcggtaaggagacctgcgccaatcccctgcgccgcacgcgtggacaagcgtgcggccagatcctgagacatccagtccataccgacttcacgcaccagctcactggctcccgcaaacgcgatattcagcaacaccagacggaacagacgaaggcggctgtaataaccaagttcaatgccatacagcgttgcgatgcggttaatcaggcgtaaattacgccaggcaataaacgccatatccaccaacgctaacgggctgacggcgatcatcagagtcgattccgcggcgaaacggctaatctcacgtcgcgcctgcgcgtcaagtaccggctgtaccagattcgcatacaaaccgacgatttccctgtcgttttgcgtttcgtgaatagcggcataccaacgttgtaatgccggatgtgattgatcaatccccgcctgctgcgccagtttttcgcaaaatgcgcgacctttcccgacgctatggctatgtaacagttcacgcgcttcatcgcgttcatgcgcccgctggcgcaagcgccataatcgccgccactccgtgaccaccgatcccacgccagcgccaacgatcagcgcgcctgcggcacagccgcctaaagcgacccagtcctgagtttgccaggcattcattgtccactgtacgccttgcccgaccacgctcgcgccaaacagcgccagtcctcccatcaccattttacgccacaggctgcgtttggggcgcagcgcggcatcgaccgccgcttctgccgcgccttcgtcttccgggcgctcatcgatagctgcaggcgcaaatgtacgcgactccgcttcgctgaaagtttgctgcgctttgaaggccgacgtaggttcctcctttagcggttctgcaaaatcaatacgcggttttaacggttcgctcatcgcagcttatctcctattaaaaactccagcgcagcgtccagacgaatatgcggtaacggtttatcaacatccatcacctgcggacgaaaggcttcgaactgaaaaccctgactatcccaaaacgcttgccccggcaaacgcgaaggcacttcgccggggtacacggttaacggcgcgccgtcactcaaacggtttccacgtaaagccgggattttttcgccgttgacctcaatcacaccgctggtggtcgcctgtaccgacgccagccccaggcaatccatactaatgccttcaaacgcggcattttgccaggcatcctgaataagctgctggagcaaggccaccatattggcatgttggtcgagggtgacatggtcggctttcgtcgcggcgaacagcaatttatcaatcaccggcgaaaacaaacgacgaaacagagtccgctggccatagtgaaaactttgcatcagctgcgttaaggcgagacgcatatcattaaacgcctgcggcccgctattaagcggttgcagacagtcgaccagcacaatctggcgatcaaagcgtagaaaatgatttttgtagaaccctttgaccactttttcgcaatagtagttaaagcgttcgcgcagcattccagcgttggtctgtttatccgcctgcgccagttttgactcgccgaaggcgtccacatccggccacgggaaaaactgcaatgctggcgcgcccgccatatcgcccggcaaaacaaaccgtccaggctgaataaaatgcaatccctgcgatttacactgatgcaaataatccgtccaggcggcggcaatctccgccagccggttttcatcggcgggcgccagcggatcgagcccgtcgcaaagttgccgccattttgcggcccactcagcgcgttgtccttgtaacaagccgttcatctgacgggaccagcttaaataatcctgagccagcatgggcagatcgagtaaccattcccctgggtagtccacaatctccagatacaatgtcgaggtatctttaaaatggcgcagcagcgagtcgttggagcgatagcgcaacgccagccgaatctcactgacgccgcgcgtcggtgtgggccaggcgggaggattgccataaagctgaagtatcccctcgtcgtaggtaaaacggggaataccaaaatcacgttgaggcacacgctttacgccaagcaggcgttcttcgcgtaccgcgctgagcaacggtaagcgcgcgcccgcgtggacattaagcaactggttaaccatcgccgtaataaacgccgttttaccgctgcggctcaacccggttacggcaagacgcaaatgcctgtctaccccacgattgaccagcgcgttgaattcagttttaagtcgcttcattgacatcctgttgagcctgaagagaagaaaaaataataatgagcctgcgttatagatatgtgcaaaaacgttattatcaactacccggagagatcaacaacggcgcattaagcgccgcggttagtatgagtattgagcaatagattatctatttttttactttcggcatatcaagacgactgataccgcccatattcatcgcgtgcgtataccccatatcaagcaacatttgttttgccatgcccgactgtcgcccggagttgcaatataactttaccgtatcgttcctgtctggaactaccgtttcgatatgagatttaatctccttcaatgggatattaatcgcgccctgaatatgctctcgctgatattgttccggaatgcggacatctatccagtattctgcggcataaagcggcatggctatgaataacgctaacgcaaatattccttttttcaacatacttccgtcctgacacgtaatgtatttcgcacacactatacgccagagcttaacgaaatattatgaccagactcgctatttgtaacgctgcgaaattttattcgccgccttacgaagtactggctccagcgcaaacgccagcaacatttttagcggacgacgggcgacggattttaccgcccatcccgccacgccggcaggcccgtagcgtaacgcggtcaacagaaccagcttacctgctattttgaagccgggcttcaccttctgcccggcgcgttgccagcgagtattcatcttcaccttcccgatatatcacttacagttgacggaaacgactacgcagtgtgaacgtatctgacgtgacgtagcgttccatttctcgcaaacgcttttcgcctgcggcaagctctctgtctacggtatccagcagttcgccgctggtcggctgcggtttgcctgcggccagattatccggcatagggtccagtacaaaagacagaacgatataggccactacggtaaaaaacgccagcccaaagaaaatcgacagcacgaccagaatacgcaccagttttaccggtacatcaaggtagtcggcgatcccggcgcaaacgccacgcaccatgcccttttgcggcatacgccatagttttttattcagattgattccacccattagcgctctctccagttcggatgctctgcatcaagaatgtcttccagcgcctgaatgcgctcgcgcatacgttgcgcatcgtctgtgagttgcagtaagcgttgctgctcgctttgcgacagttctccccgaccggcgcggttgctgtaatgcagccacagccaaatcggtaacacaaacaacacaaaaatggttaacgggatggccagaaatagcgcgctcatgcgttctccttacacctaaagctgatgagcgacggcgcgtatcggcgccgccattgtcattattgattatcttgcttcattttggctttcaactgcgccagctgctcgctgatttcatcatcggctttcaggttggcaaactgttggtccagcgattgctgcttaccaaaacgatggctttccgcttccgcttccatttgatcgatacgacgttcaaaggattcaaaccgcgccatggcttcatccagtttgccgctgtcaagctgacgacggacatcgcgggaagaactcgccgcctgatgacgcagcatcagcgcctgctggcgagcgcgtgtttcgctgagtttgttttccagctcgccaatctctttcttcatgcgcgccagcgtgtcatccaccagcgtgacttcctgttcaagcgtagcaattaaatcggtcagcttttgtttttcaatcaatgcggcgcgcgccagatcgtctttatctttgcgcagggccagttccgctttttcctgccactcgatctgctgagccgtagcctgttcaatacgacgggataactgtttcttttccgctaaagctcgcgcggagttcgagcgaacctccaccagcgtatcttccatctcctgaatcatcaggcgcaccagcttctgcggatcttccgctttttccaacaacgcattgatattggcgttcacgatgtcggcaaaacgagaaaaaatacccataattcaatcctcacataatgttctgataacgggcgatgccctgctatgtgattaatacaatttgcgtgccaacttttcataccactgataataaagaaattgtttcgttttacctcgccagcaaaaaaggataaagtggtgaaaaacactaacaagtggcgattttcatcatggctgaatttaaagataacctgctcggcgaggcaaaccgttttcttgaagtactggaacaagtctcccggctcgcgccgctggataagccagtgctgattattggcgaacgcgggacgggtaaagaacttatcgccaatcgactgcattatctctcttcacgctggcaggggccgcttatctcgcttaactgcgcggcgcttaacgaaaatctgctggactccgaactgtttggccatgaagcgggcgcttttaccggggcgcaaaaacgtcatcccggtcgctttgaacgcgccgatggcggcacgctgtttttggatgaactggcgacagcgccgatgctggtacaggaaaagctgctgcgggtgattgaatatggcgagctagagcgcgtcggcggcagccagccgttacaggttaatgtgcgattagtatgcgccactaatgccgatttacccgccatggtgaaggaagggacatttcgtgccgatctgctcgacaggctggcttttgatgttgtacaactgccgccgctgcgcgaacgccagagcgatatcatgctgatggccgagcactttgctattcagatgtgtcgtgagctacgtctgcccttatttcccggttttaccgatcgggcaaaagaaacgttgttgcattacgcctggccaggtaatgtccgcgagctgaaaaacgtagtcgaacgttcagtgtatcgccacggcagtagtgaacaacctttggatgaaattgttatcgatccttttcaacgccatcccgctgaaccgcccgcgcccgccctgccagcggcatccgtcacgcctgacctgccgctcaaattacgtgagtttcaactgcaacaggaaaaagcgctgctgcaacgtagcttacagcaggcgaagtttaaccagaaacgagccgccgatttgctggcgctcacctaccaccagtttcgcgccttgcttaaaaagcatcagctttagctatttctccggctaattgacgacatttacgccagttatccaccgacatttttacgtggcgggccgaagtgcgatacactttgcaaattgaacttcaaaaacttaactattatgcgcctggttttatcgtctctgatcgtgatagcgggtctactaagtagtcaggctacggctgcgactgcgcccgaacaaactgcgagtgcagatattcgcgatagcggctttgtgtattgtgtcagcgggcaggtcaacacctttaatccgcaaaaagcgagcagcggcctcatcgtcgataccctggccgcccagttatatgatcgcctgttggatgtcgatccctatacttatcgtttagtcccagagctggcagaaagctgggaagtgctggataacggggcaacgtaccgttttcacctgcgccgcgacgtttcctttcaaaaaaccgcctggtttacgccgacccgaaaactcaatgctgatgatgtcgtctttacctttcagcggattttcgatcgtcgacatccgtggcataacatcaacggcagtagcttcccctactttgatagcctacagttcgccgacaatgtaaaaagcgtgcgtaagctggacaataacaccgttgagtttcgcctgacgcagccagacgcctcctttttatggcatctggctacacactacgcttccgtcatgtccgctgagtacgccgcgcagcttagccgaaaagatcgtcaggaactgctagaccgccaaccggtcggtaccgggcctttccagctttcggagtaccgtgccgggcagtttattcgtctccagcgccacgatgggttttggcgcggcaaaccgctgatgccgcaagtggtggtggatttaggctccggcggtaccgggcgtttatcgaaattactgaccggtgaatgcgatgttctggcctggcccgccgccagccagctaactattttacgcgacgatccgcgtttacgtctgacgttgcgcccggggatgaatatcgcctatctggcctttaacaccgataagccgccgttgaataatcccgcagtgcgccatgcgctggccttatcgatcaacaaccagcgcctgatgcagtcgatttattacggcacggcggaaaccgcagcctccattttaccgagagcctcatgggcttacgataacgatgccaaaattacggagtacaatccgcaaaaatcgcgcgaacagctaaaagcgctgggcattgagaatcttacgctgcatctctgggtgccgaccagttctcaggcctggaacccaagtccgctaaaaacggcggagcttattcaggcggatatggcgcaggttggcgtaaaagtggtcattgtgccggttgaaggtcgttttcaggaggcgcgcctgatggatatgaatcacgatctgaccttatccggctgggccacggacagcaacgatccggatagctttttcagaccgctgttaagctgtgcggccatcaattcgcaaaccaatttcgcccactggtgtaaccctgaatttgacagcgtgctgcgtaaggcactgtcgtcgcagcagttggcttcgcgcatagaagcgtatgaggaagcgcagaatatcctggagaaagagctgccgatactgccgctggcatcatcactacgcctgcaggcttaccgctacgatattaaagggctggtgttaagcccgttcggcaatgcgtcttttgccggcgtctcccgcgaaaaacacgaagaggtgaaaaaaccatgattatcttcaccctgcgtcggttattgctgttgctggtgacgctcttcttcctgacctttatcggctttagcctgagctattttacgccgcatgcgccgctacaaggcgcatcattatggaatgcctgggttttctggttcaacggtctgctgcactgggactttggcgtgtccagcattaacggccagctgatctccgaacagcttaaagaggtgtttcccgccacgatggagctgtgcattctcgcctttggttttgcgctgatggtcggcatcccggtcgggatgctggcgggcgtgacgcgtagcaaatggccggatcgttttatcagcgcgctggcactattaggtttctcaattccggttttctggctggcgcttctgctcacactgttcttttcgctcacgctggggtggctgccggtatccgggcgatttgacctgctttatgaagttaaaccggttaccggtttcgccatcattgacgcctggatttcagattcgccatggcgtgatgaaatggtgatgagcgccatacggcatatggttttaccggtgctcacgctctccgtcgcgccgaccacagaagtgatccgcctgatgcgaatcagcactattgaggtctacgatcagaactacgttaaagcggcggccacgcgcggcttatcgcgctttacgattttacgccgtcacgtgttgcataatgcgctgccgccggtcattccccgtcttggtctgcagttttcaaccatgttaacgctggcgatgattaccgaaatggttttcagctggcctgggctgggacgatggttaattcacgccattcgtcagcaggactatgccgctatttccgctggcgtgatggtcattgggtcgctggttattgtggtcaatgtgatttccgatattttgggtgctatggctaaccctctgaaacataaggaatggtatgccttacgatagcgtatacagcgaaaagcgcccgccaggcaccctgcgcactgcctggcgtaaattttatagcgacgcgcctgcgatggtgggtctgtatggatgcgccggtctggcgttgctgtgtatttttggcggctggatcgcgccctatggtatcgatcagcaatttctgggctatcagctactgccaccctcctggtcacgctatggcgaagtctccttttttctggggactgacgatctggggcgcgatgtgctgagccgcctgttaagcggcgcggcgcccacggtcggcggcgcgtttatcgtaacgctggcggctacgctatgtggattagtcctcggcgtagtggcaggcgcgacgcacggtttacgctctgccgtgctgaaccatattctggacacgctgctttccatcccttcgctcttgctggcgattatcgtcgtggcatttgccggcccacatctgtcacacgcgatgtttgccgtctggctggccctgttgccgcgaatggtacgttccgtctacagcatggtgcatgatgaactggaaaaagagtacgtcattgccgcccgtctggatggcgcgacaacgctgaatattctgtggttcgccattttaccgaatattaccgccggtctggtcaccgaaattacccgggcgctgtcgatggcgattctggacatcgccgcgctgggatttttagatctcggcgcgcagcttccctctcctgaatggggcgccatgttgggggatgcgctggagctaatctatgtcgcgccgtggaccgttatgctacccggcgcggcgataacgctcagtgttttactggtaaacctgctcggagatgggattcgtcgtgcgattattgcgggggtggaataatgccgttactggatatccgcaatctcaccattgaatttaaaaccagcgaaggttgggtaaaagcggtcgatcgcgtcagtatgacattaagcgaaggtgaaattcgcggcctggtaggtgaatcgggttccggaaagagcttgattgctaaagctatttgcggcgtcgcgaaagacaactggcgagtcactgccgaccgtatgcgttttgatgatatcgatctgctgcgcctctcctcacgtgaacggcgtaagctggtcggacataatgtgtcgatgatcttccaggagccgcagtcgtgccttgatccttccgaacgcgtcggccgccagttaatgcaaaatattcccgcctggacctataaaggccgctggtggcagcgtttaggctggcgtaaacggcgtgcaattgaattactgcaccgggtgggaattaaagatcataaagacgcgatgcgcagttttccctatgaactgaccgatggtgagtgtcagaaagttatgatcgctatcgcgctggcgaatcaaccgcgactcctgatcgctgatgaacccaccaactcaatggaaccaacgacgcaggcgcaaatttttcgcctgctgacccgactgaatcaaaacagtaataccaccattctgttgattagccacgacctgcaaatgctgagtcagtgggctgataaaatcaacgttttatactgcggccagacggtagaaaccgcgccaagtaaagatctggtgacgatgccacatcatccttatacgcaggcgcttatccgcgcgattccggattttggcagcgcgatgccgcataaaagccgtctgaatacgctgccaggcgcgatcccgctactggagcagttaccgataggttgtcgtctggggccacgctgcccttacgcgcaacgagaatgcattatcacgccacgcttaaccggcgcgaaaaatcatctctatgcctgtcattttccgctgaatatggagagagagtgatatggtggaaactctgcttgaagtgcgcaacctgagtaaaacctttcgctaccggacaggatggtttcgtcgccagaccgtcgacgccgtgaaaccattaagctttacgcttcgtgagcgtcagaccctggccattatcggcgaaaacggttccggcaaatccacgctggcgaagatgctggccggcatgattgaacccaccagcggcgagcttcttattgacgatcatcccctgcattacggcgactattcgtttcgaagccaacgtattcgaatgatttttcaggacccctcaacgtcactgaatccacgtcaacgtatttcgcagatccttgacttccccctgcgccttaataccgatctggagccggaacagcggcgcaaacagattgtcgagacgatgcgtatggtggggctattgcccgatcacgtaagctactacccgcatatgctggcgccggggcagaaacagcgtctgggcctggcccgcgcgctgattttacgccctaaagtcattatcgcggacgaagcgctggcttcgcttgatatgtccatgcgctcgcagctcatcaatctgatgcttgaattgcaggaaaagcaaggcatctcctatatctatgtcacgcagcatatcggcatgatgaagcatattagcgatcaggtattagtgatgcatcagggggaagtggttgaacgcggcagcaccgccgatgtgctcgcctctccgctacatgagcttacccgccgtttaatcgcaggccattttggcgaggcgctgaccgctgacgcatggcgaaaggatcgctaagcgaaacaaataccctcagttcgattctctgagggtgttcatgcgactgcccaacagcaatgtttcaacctcttctaacgcaacggaaggaaataacgtgccctgggttgcccaaatgcctgccgtttttaacaccggcaaatagcgtgtgttttcctggccccccaccacgatcttgtcacaataacgccggatatgtttgacaagcagcggaaacgtcattttttcaatttgtgagacaaaaaagctgcgatcaagttttacgccgctaaaacacccgcaaactaatggcgcagcagttgcattccctacgcccaggtcgcccagccataatggattaggttgcttatgaagcgcgtgtattaaaggatcgattaaggcgttatcttgacatgaaaaatgttcagcgacctgcagctccacaaatagcatggcgtgtagtaatgcgcgaatatctttatcctgaaggacaagctgcgccataccccgatcaatatttacgatacagaataggccgtggcgtagaaaccagccatgtttggccgcgattgtccgcaacagatcaagcagaaaacggcgcttctgcgaattgtcccatgacgagataacaaactcaggatgtagcggacgagcgggcgacgatgcaaaatgggtagtgatttcgacacccagtaaatccccctccattgcccttatcggctctgccataaaaaaatagcgcatgtgaccactccacttgatcttaactccctgataatgcgcttttaacgcaaatcaatcaataaaaacgatcaatatataaaaaatgatcgaaaaaaacaatatatgttaacttcatgataacttgctaattttatgttttgagaatgttcttctattgctataaggaaatttacatactacgccgaacaacgctaatacgacggcatgagaccatccgtaaagccaggtttttcttgtcaggcagaggggaaaaatcaaggcgagttaatgttgttacaccattgcgaggcatttcacccactatggcagcgcggcatcgccaaccctagtggcgagttgcatctccgctacaggctgtccagatcccccgaacgacctttaagcgaatagcaactctcaataattgatcggtaaatctgtagcgaatgtgcccccggcgattcgcagaaaagaacggaactaaatgctatttttttaattcatcctttaataccttagccacaagagtcccttcctccggcgcggctagtttaaaacgtcttcctggcgcaggtgtctgttcttcctctccgattaacgcatcaagatccgtaataagtgacttataatattcaacatcttcagtatttccttcggtctcggcccgctttaattttatcatgtgatgggccttaatttgctcttccagttgccttgttgcaagagaaacgcttcgctgttgccgtgattcttgtgataacacgatttgatcgccatccacaaagaaaagaaccccctctttaaccagaatattacctaagatatttatatcatgcatataaaccccccgggatttaagaagcgcctccgccattcgatagttatcttcatcttcaacatcgaactcctgaccttgaatatattttgaaactaaaaccgtaacgtctttaccattaatattcatgatggccgaacgagaaaaattcttgtcgtcattggccatattcaaatacttactgacacgatcaggatgacaattacgatgctccggagagttaacatccacttttattccccgctcattaactggaatcttaacaacaaagtcatcatgtaaccgatagactgtcccataacttccgctacctattttatttttttcaatatcacgcatgcgaatatttttctgaaactccggcgagttaataaacgcctctattgccgctggttgtgatgcatccgtctgatcaatagcgccgctctcataaccagacgccgtggcgggcgtggtcaggaagtctatcaaacgttgctcaaaagcctcatagattccattactacctgcctcgctcggcggtagattatcattacccaaagcggcaagcgtaatttccccgttattataattaaacatcgtttcttttaaaaaatcgacgcaacgttcagaacactccgtctcggtcactaatactccatcgtaaaacatctgtagtagtaacatattttcttgatgtgctaatacctctacagtgtatttatctattgtttcaggtctggaggcatcaataagtttaatatatccaagaagggggcgccatcgtgtacagtcttcatctcgcttcgaaaatggtcctggagagaaaggccctttaatatcgggatgctcttttttttggcacagtagattatagatttctctataatcagaaattaaacttcgcctggtaaatatattcctgaaaaaatctataaatttctcacacgttgaaaaaacatgttctcttttattatcgatgatatctcttaaatacctttctgatatctggcaactatgatttccgatctgaaatgtaaacggcatatgtctcatcctctgaaaatttattataatacacatgcaaacatataaaaacctgatttgtaactactgtaatcacctgatttccaaaatttttcatattcagtattactctgcatcaataaatagagaaaaccttcagcacctaaaaaagaaattatttttgttaagcatttgctggttaaagttacatgtccataacatcgctaataggtgaggtaaaccatttggatgaatattcaggcttcctacagaacctttatttgtctggtggaaagcgcatcgctatcgtacttgctatccgtcccggtgtctctggttggatgaggcgaaccttacaccagctggtatactgcaccgtagggcctgtcccattagactctttgatttgccagtttggccctggggagtgctcaaaatcctcagggacttcgttaccgtgtggttttagaacgtcacctgccggagatagcggcggaaaaatagcgtgacacacggggccaggagtgggatataatttcagactaatttcgaataatgttgaaaagttgctgttaaccattgttcgtaaaagcaaaaaataagcaatgactataaggattaaagctatgggttttctttccggtaagcgcattctggtcactggcgtggccagtaaactgtccatcgcctacggtatcgcacaggcgatgcaccgcgaaggagctgaactggcgttcacctaccagaacgacaaactgaaaggccgcgtagaagaatttgctgcccagctgggttccagcatcgttttaccgtgtgatgtcgctgaagatgccagcattgacgctatgtttgcggagctgggtaacgtttggccgaaatttgacggttttgtacactcgatcggtttcgcgcctggcgatcagctggacggcgattatgttaatgcggttacccgcgaaggctttaaagtcgctcacgatattagctcttacagctttgttgccatggcgaaagcctgccgcaccatgctgaatccgggttctgcgctgttgaccttgtcttatctgggagcggagcgcgccatcccgaactacaatgtcatgggtctggcgaaagcctctctggaagccaacgtgcgttatatggcaaacgctatgggaccggaaggggttcgcgtcaacgccatctctgcgggtccaatccgcacgctggcggcgtccggtattaaagacttccgtaaaatgctggcgcattgtgaagccgttacgccaattcgtcgcaccgtgaccattgaagatgtgggtaactcagcggcgtttctgtgttccgatctctcggcaggcatttctggcgaagtcgtccatgttgacggcgggttcagcattgcggcaatgaatgaactggaactgaagtaagcgcattaagtttattagcgggcggcacggctgtgctgccccattcccctcactcaccactcatctcgttatatagcgttctgatatttgttatcacctaacaatctttcatccctttcccgcatacgccaggataatccagcataaacgatccgacgccgaatcattatcgatcgccatttcatcctcgggaaaccctatggaacaatgccgaaaagcgggtaaaagccactggtatcatgaaacacaatccactatgtcgtcacaaaccccgctttcgctaatgccggaagccgcgtatgttaacgatcgttttttactggatttaacggtagcagaaaccgcgttgacgccttttgagtcatggttaaagcccgctcgccagttggcggatgtcttatttccccgcacggttctcaacgaccggcttcatacgtttagcgcctatgaacgtatgagcaccgcgctgaccgccgctcaggtatttggggttcagcgtttgtgtcgctattatgccgcgcgtctggcgccgctacctggccctgacgcctcaagagagagcaatcaacggctggcgcaaattacgcaatacgctcgtcagcttgccggctccccctccgttatcaatacgcgggcccgcgaacagcttgcagaggtgggattaaccgcccgggataccgtactcatcaatcagatcattgggtttatcggttttcaggcgcgggtagcggcgatatttcaggcgttttgccgtctgcccgtgcgcgaactgcccggccaggagatgcagcgctttgccagggccgcgcggtttcaaaacccccagacgatatggcggcccgccgccagtctggtagaatatcctccagcccataccaaagttcggcggcaatattcgtcttcacaatgccaaatgatggcgccggtactcatgcgcgatccgtcttcattcgcgttactcgaacgcatactgaccagcacattacacactgcatcgcccccttctttacttccacttatcacgctcctcacatcacgtatcaacggcagcgccgcctgctttaacgaacaggcaacccaacctggcgcgtggcgtcgcgctgtcatcacgttacgccaggaagacgacgacatcgctcgttgggaacttgagcctgcgctgacacaggcgatacaatggctcaccagagcgcccgatcgctttagcgccgcgcattttttcccgctactcaccaggggagtttcatcggagcaggccattaatatgttaggctggtgcggcgtgtgcggatggttaaatcgtttaaaaatcgcgttgggcgaaacctattaactcatccattactgaaagagcgcttgctgcgccaggcagaatcgcgtaaaactgtcagccgctcttttggctacgaaaatagacgaatatgtttcaggacaacccgctgctagcgcagcttaaacagcaactgcattcccagacgccgcgcgctgaaggggtcgtaaaagccacggaaaaaggctttggcttccttgaggttgacgcgcaaaaaagctatttcattcctccgccgcagatgaaaaaagtgatgcatggcgatcgtatcgtcgcggtcatccacacggaaaaagaacgtgagtctgccgagccggaagaactgatcgaaccgttcctgacgcgttttgtgggaaaagttcagggtaaaaatgaccgcctgtccatcgtgccggatcatccgttgctgaaagacgcgattccctgccgcgccgcgcgcggcgttcagcatgagttcaaagaaggtgactgggcggttgccgaaatgcgccgccatccgcttaaaggcgaccgttcgttttacgccgatttaacgcagtacatcacctttgccgacgatcactttgttccctggtgggttacgcttgcccgccacaacctggaaaaagaagcgccgaacggcgtagcgacggagatgcttgacgaagggctagagcgtcaggatctgaccgcgctgaatttcgtcactatcgatagcgccagcactgaagatatggatgacgcgctatatgctgaggaattagcggacggcagactccagcttacggtggctatcgccgatcctaccgcctggattgccgaaggcagtaagctggataacacagcgaaaattcgcgccttcaccaactacctgccgggcttcaatattcctatgctgccgcgtgagctgtctgacgatctgtgttcgctgcgcgccaacgaagtgcgtccggcgctcgcctgtcgcatgataatcgccgcggacggcaccattgacgatgatatcgccttttttgcggccaccatcgaatcgaaggccaagctggcgtacgacaatgtctccgactggctggaaaataacggcacctggcagccggataacgaaggcattgcccagcagattcgtctgttgcaccgtatttgtctaagccgcagtgagtggcgtcatcatcatgcgttagtctttaaagaccgcccggattaccgctttgtgcttggcgaaaaaggcgaagtactggatattgtggcggaaccgcgccgtatcgctaaccgtatcgtagaagagtcgatgatcgccgctaacctttgcgccgcgcgcgtactgcgcgataagctcggtttcggtatttacaacgtacatacgggcttcgatcccgcgaatgccgacgcgctggccgcgctgctgaaaacgcatggtctgcatgtcgatgccgaagaggtgctgacgctggaaggcttctgtaaactgcgtcgcgaactggatgcgcagccctccggtttccttgacagccgcattcgtcgcttccagtcttttgcggaaatcagcaccgagccggggccgcatttcggtcttggtcttgaggcttacgccacctggacctctcctatccgtaagtatggcgatatgattaaccatcgcctgctgaaagcggtcatcaagggggaagctattgcgcgtccgcaggaagatatcacccaacaaatggcggaacgccgtcgcctgaaccgcatggcggagcgcgatgtcggcgactggttatatgcacgcttccttaacgataaggcggggacaaatacccgtttcgcggcagaaattattgacgtcagccgcggtggtatgcgcgtgcgactggtcgataacggcgctatcgcctttatccctgccccgttcctgcacgccgttcgcgatgaactggtatgcagccaggaaaacggtacggtacagattaaaggtgagacggtttataaagtgacggatgtcattgatgtcactattgcggaagttcgcatggaaacccgcagcattattgcccgaccggcagcgtaaccacgcttagctcactcaacggcctttgctgagaaggcaaaggccgtttcttttcttcttctcccttccgtcatgctctaagtttaatcttattcaagcgccccatttcttgttatttttagctggcgactatgctttttccagaatctggattacatatgaatacatagataaaacaatacgttcagccataattacccttatttataacatggctaacctttcttttcgggcacctggcgcttaaatgggatggtacgcatgatgaaacagattcaggaacaaacggcgctaaatccccttcactctcactggcgtctggctgatgaccgcaacgtgctgtatctctccccgacaggtgaaacggatgcagaaaaaacggttgagctatcgccggaacaagccgggcgtatccgggaaataacggcgattacgtccagtctgctgataacgttgttgatagaaaaacaggttaccgctgtgcacctggtaggccgtaagattaataaccgtgaatgggctggcagcctggcaacctggcctgatacgcctgccgtctcgccaacgcaggcgcaggagctctcttttgccgagcaaatcgtatcagaagccaactcagtcattgcgatactggatagtcggggaaaaatctgtcgatttaatcggttatgcgaagagtacacaggcttaaaagagcgagatgtaattggtcaaagcgtctttaaattatttatgagccgccgggaggcggttgcctcccgacactacattgagaatttttttcgcaatggcaatgcctatgaaatcgaacgctggataaagacccgtaaaggccaacgcctgttcttatttcgtaataaattcgtccataacggtagcggaaaaaacgaaattttcctgatctgcgcaggcacggatatcaccgaagaaaggcgggctcaggagcgtttacgcatactggcgaatacagacaccgtcaccggcctgcccaatcgcaatgctattcatgaatttattaatcatgctattgcctcggctggcgagtcgcaggtgggtatcgtttatctcgatctggataacttcaagaaaattaatgacgcctatgggcatatgtttggcgatcagctcttacaggccgtttcgctggcgctgttgagttgtctggaggaagatcaattgctggccagactggggggagatgaattcattgtcctcgctgcccatacgtctcaggccgcgctggaagcagtagcctcacgaatccttacccgtctgcggcaaccgtttcgtattggactcattgaagtttacacgggatgcgccattggcatttcgttggccccccggcacggacaggacagcgaaagtctcattcgcactgccgacaccgcaatgtataacgccaaagaaggcggccgcggtcagttctgcgttttttcgccggaaatgaatcagcgcgtatttgactatcactggctggatacaaacctgcgaaaagcgctggaaaacgaccagttacttattcactatcagcccaaaattacctggcgcggcgaagtacgtagcctggaagcgctggtacgctggcaatcgccggaacgcggattaattccgccgctggagttcatctcatacgccgaagagtcaggactcatcgtcccgctgggccgctgggtgattctggatgtagttcgccagattgcgaaatggcgcgataaggggattaacttgcgcgtagccgttaacttttcggcgcgacaactggccgaccagacgctttttactgcgcttaaacaggctttgtacgatctgaattttgagtattgcccgatcgatgtcgagctaacggaaagctgcctgatcgaaaacgacacgctggcgctatcggttatccagcaatttagtcagctcggcgcccagattcatctggatgattttggcacagggtattcttcgctttctcaactcgcccggttccctattgatgccgttaaactggatcaggctttcgtcagagatatccataagcaaccgctgtcgcaatctctggttagggcgattgtcgcggtggctcaggcgctaaatttacaagtgattgccgaaggtgtagaaaatgctaaagaagatgccttcctgacaaaaaacggcgtcaatgaacgacagggctttttattcgccaaacctatgcccgccgtttcttttgaacgctggtacaaacgttatcagacgaaaaaaatgcgttaatggcgacgataatagggagaacaacctgtgcagacaggcatagccctatttttcccttctcttttcagattaatttctgcatcatgaattgaaaccttttctgacattaaggatgacaaacatgtctgatatcgaagcacaacgaattgccgcacgcattgataccgtgctggatatccttgttgctggcgattaccactcggccatcaataaccttgaaatattgagagcagagctgttagatcaggttaaagacggtatctcgccatcccaggctcccgggtcgccctgggaaatctgatagcgattatttgtccgggatggccgttagcccttcccggctctctgactgtctgttgactcctcttaacgaataaaattaatactatgaactcccgacaacaatcaattttgcaaatggtggttgataaaggccagatgagcgttgctgaactggcgaaaattaccggcgtatctgaagtcacgattcgtcaggatctgaataccctggaaaagcagagctatttacgccgtgcgcacggtttcgccgtttcgcttgagagcgatgacgtagagactcgcatgatgacgaactacacgctaaaacgccgactggcggagttcgccgcctcgctggtcagtccaggggaatccgtttttattgaaaatggcagcagcaatgcgctattggcccggacgctggcggaacaaaaagatgtcacgatcatcaccgtgagcagttatatcgcgcacctgctcaaagagaccccttgcgaagtcattctcctcggtggaatctatcagaaaaaaagtgaaagcatggtagggccgttgacgcgacagtttatccatcaagtgcatttcagcaaagcatttatcggtattgatggctggcaggctgataccggttttaccggacgcgacatgatgcgatcggatgtggttaacgctgttctggaaaaaggctcagaagcgattgtcctcaccgacagctccaaatttggctgtgtgcatccctatcccctgggcccgctctctcgcttccatcgtgtcattacggattccaaaatttccgccagcgatcaaatgcagttagaacatgcggggctgctagtcaatgttattggctcatccgtttaaaatatttcccgatggtttgccctatggcaaatcatcctctctctaagacttttctgacatcccaattaagactatttacctgttgtaacgagcgtaacgtcgtaaaattaatattagcgaaataacaggaagtgactatcacctgcgtgatatacccctgcgcaatcaggttttacggaaaatctcttaacaggttttattttaactatagttatagtgagcttaattccgtgaatcgttaattcaggagagagtattatgtttatgacgagcaaaaaaatggccgctgctgtgctggcaatcaccgtagcaatgtctctgagcgcctgctcaaactggtccaagcgcgatcgcaacacggctattggcgcaggtgcgggggcgttaggcggcgcagtgttaacggacggcagtacattaggcaccctgggcggcgcggcggtcggcggcgtgattggtcaccaggttggaaaataatccagacgtttaaatattgaacggctcaaaataatacgtttattcttttcaggtctggattacaaaaatagacaaagttgacttttacgccacggtaatttacaaccgtggcgttttcattagccgccagctaattttactttcattcctttagcttccagcaatgattttatcaagtcgcgtttatcaccctgaatttcaataatcccttcttttactgccccgccacagccgcattttttcttcagttcagccgccagtttggttaattccgcatcattcatctcgataccggtaatcaaacatacgcctttacccttacggccactggtttgacgctgaatgcgaacgataccatcccctttgggacgaaccggcgccgttttaggttcttcaatgcgccccgtctgcgttgaataaaccagacgactattggaatcgctcattatgcctcccgtttcagtgacgcgttaatatccttcagcgtttgcgccggatctaccgattgcgtaaccgggcggccaatcaccatatagtcaacgccagcggataatgcctgttcgggcgtcataatgcgtcgctggtcgcctgcctcgctgcctgcgggccgaatgcccggcgtcactagcttaaatgcagcgccaaaggcctgtttaaatctgacagcttcctgagcggaacagaccacgccatccagcccgcattgctgcgtcaggcgcgccagccgctccgcatgttccgccggtgacaacgtcacgcccagatcgtgtagatcgctggtttccatactggtcaacacggtcacggcaatgagcaacggcgcatctttactgaatggcgccagcgcgtcgcgcgctgcggccatcattctcgccccgccagacgcgtgaacgtttaccatccagacgcccaggtctgccgcagcggcgaccgcccgggccgtggtgttgggaatatcatgaaattttagatcaagaaagacatcaaacccacgttgctggagatcccgaacgagctgtggaccaaacagcgtgaacatctctttgcccacttttaagcgacaatcgcgaggatcgattttatcgacaaacgccagggctttatcgcgttcatggtaatccaacgccacaacgacaggcgattcagtaatagcgcaggaagaagatgaagcagtaaacgtcatgaccagaccttcttgatgatgggcaccggaagtggcgcaaattggataaacggcgtgcattctacctgcggcgcagggaaattaacaggttcgattgacaacctgataagccctggtcgccgatgctagcgtcgtttcttgttttatgtcattaagtatgttgtaactaaagcgaggctttttttatatactactgcccatcaagtccgcgaataggtttaatggtcgaccatgcccggcaggacggacagtgccagtacaaggtataggcggtaaaaccgcatttctgacaacgataccgcggtttactgcgcacctgctcgccaaccatatcacgcagtaccatcaggctttctttcgctcgcccttcttccgcctcgttgagatggtaatccatcagcttatggaacacccgcatggtaggatgtcgctgtagctgacgcgtgatatagacttgagctgcgtcactaccttcacgtgcttccagaatatcggcaagcattaactcagcgccagcaccggtattctcctcaacggcgcgacgtaaaaactccgcccactcggcatttttaccgagctgttgataacaggtttgcagcatctccagcgtttcgctgaccagctctttatcctgaacgatcacacgttgcaggctttcgaccgctttggcgtaatcccctctcgccatataaacgcgccccatcatgatagacacccgggcgctatttttatctgcggcggcaccttttttcagcaacgccatcgcgcgatccatgtcgtcgttgcccatctgctgtaacgctaactcacagtaaaagtgggcgatttcgatacgctgtttatctttgcccagtttcaccagccgttctgctacttcgatcgccttttgccagtcgctggttagctgatagatttgcaagagctgctgtaacgcgcctacgcgaaattccgtttcgtcggtaagttggttaaacatatcttccgcgcggtcatataaaccggcggccatatagtcgcgccccagttgctgaacagccagtaaacgctgttcataggtcaatgaagcgctttccatgagcgtttgatgaatacgaatggcgcgatcgacttcgccgcgtgagcgaaacagattaccgagagtgagatgagcctcaacggtgcccgtatcctctttaagcatatcgaggaacagatccaccgctttatcttgttggttactcagcaggaagttaacccctgcgacataatcgcgcgacaggcggttagcttcatcctgttttgtttgttgcgcacttctgcgacccatataccacccataggcagcggctacaggcaacaacagaaataacaactccaacataaatgattattcctttacaaccgacgaatcggcagggaccgcaacgtcggttgctggcgagagcttgttttccagtcgtttaattttacgttcagcgcgggcaagggaaacgcggacccgcagccagaacaggccgcaaatcagccagccaatcgcaaaaccgacggcgaacagcacagcaagcaacgtggagatacgatactccccttgcgccagcaggtagttaaacgtcacctgttgatcattctgcgcgcccagcgtcaccgaaataacaaaaatcgccaataccagtaagaaaatgagtaaatatttcacattacttcccgttatgtggtttgcgcgaataaatcgtgtccaacttaccgcatccagccttctaaattaccattttcccgcctcgcgcgaaatggaaatgcgcccaccatcagatgatttaagggcaatagtcagaaaatcaaccgttgtcagctttcctgctcgcgttcagcaatttcttgcgcttcttcgcgaggcggcataagcggcccgcaaattcgctgcgccagccaggtcgccagggtaactaatagccaggagatgagcgtggcgaccactaaatctcgcggccagtgcattcccagaagcaaacggctgcccattacgccggtcgcccagactaacaaaaacgcgatggtgaaagtccgtctgcgcggccataacagacccacggccaaaagcgcccagctcgctgcaaacatggtgtgtccggagggaaacgcaaagcccgtctctttttgccagtgctgacgcaggaaaacggggatgttctgttgcccggccaactgctctttcactaaatgtccgcgttctgtacgctttaaagtgtagaactcatcgacgggaatatggtgcgttttttcaagccagaccacaaatggccgcggctcctgtacgcgctcctttacccatgacttcacgccctgcccgacgataatcgccccaccgagaatcgcaaacagcataatggcggcgcgcaggcgaaatcgcaggcaccataagaaccatccacaaagaatcacatgcgtgataacgccccagggtttggtcacggtttccgttatccagaatagcgtttttagccaccagacctgatgtcctggctgccactgccagcctgatacccatacggcaagcggcatgataagcaacagggcggcgcctgccgcggtgcgcctcgcaattgaaagcatggatgctccttttataagtaagtatcacaatcataactgaaaattctcgccggactggaaaattgacaaatttgtgccattcctgagcaattacgtggtagtgattaggtgatgtccgccgccttatggcaaaatagcgggatacaagccaacaggcgacgacaccgcaggcgtcagcataatctggagaaatacatgcagcttaaacgtgtggcagaagccaaactgccaaccccattgggtgactttctgatggtgggatttgaagaactggcaaccggacacgaccatgccgcgctggtttttggcgatatttcaggtaaaacgccggtactggctcgcgttcattccgaatgtcttaccggggacgcgctttttagtctgcgctgtgattgtggttttcaactggaagccgcgctgacgcatattgcggaagaaggacgcggtattctgatttaccaccgtcaggaaggccgcaatatcggcctgcttaataaaattcgcgcttatgcgttacaggatcaaggctatgacacggtggaggccaatcatcagctcggctttgccgccgatgagcgtgatttcaccctttgcgcggatatgttcaaattactcggcgtggatgaagttcgcctgctgaccaataatccgaagaaagtcgaaatactgaccgaggcgggaattaatatcgtggaacgcgttccgctcattgtgggtcgtaatccaaataatgagcattatctcgatactaaagcggccaaaatgggccacctactaagtaagtaagccaccggtattaaagcgcgggcctgcctgtttacggcaggcccgataaacggctttagttcagcatatttctaatgacatagtgcaagatgccgtcattctggtagtaagtcagctcggtggcggtatcaatgcgacagcggcaaggcaccgtttctttgctgccgtccgatctcgttaacgtcaccggaatggtcgcgccagggcgcaggttttgcagatccgcgatatcaatcacctcttccccggtcagtccaagcgttttacgcgttacgccctgtggaaactccagcggcaggatccccatcccaatcaggtttgagcggtggatacgttcgaacgactcggcgatcaccacgcggatacctaacagccgcggaccttttgccgcccagtcacggctcgatcccgacccatactctttcccggcaattaccgccagcggcgttttttcctgctggtagagcatcgcagcatcataaatcgacatcgcttccgtacccggtaaatgccgcgtcatgccaccttcgacgccgggcagcatttcgttgcgaatacgaatattggcgaacgtaccgcgcatcatcacttcatggttgccgcgccgtgatccataggagttaaaatccttccgctcaacgccgtggttttgcagatagcgtccggcgggactgtccggcttgatactgccggccggggaaatatggtcggtcgtcaccgaatcgcccagcatcgccaggatacgcgcgccgtggatatctttgactggcgcaggctgggcctgcatttcatcaaagaaaggcgacaggcgaatataggttgaatccgactgccagccgtaggtatcggacgattcaacctgaatcgatttccattcttccgtgccctcaaacacttccgcatactctttacggaacatatctgatgataccagttcaacggcgcgggcaatttcctgcgccgaaggccagatatccttcaggtataccggatcgcctttacgatcgtaccccagcgggtctgtcgcgaggttaatattcatgtttccggccagcgcatacgcgaccaccagcggcggcgacgccagccagttcgttttcaccagcggatggatacgcccttcaaaatttcggttaccggaaagcacggcccctaccgtcagatcgccttttttaatcgcggtctcaataggctccggcaacggaccggagttcccgatacaggtcgtacagccataaccgaccaggttaaaaccgagctcatccagataaggcgtaagtttggcctgcgccagatagtcagataccacttttgaccccggcgccagagaagccttgacccacggttgacgcttcaaccccagcgttactgcctttttcgccagtaatcccgccgccatcagcacgctggggttcgaggtattcgtacaggaggtgatggcggcaatgacgacagcgccatccggaagctgatatggctgtccgttcatcgtatagtcaaccggctggcgatctctttgcgcggtattcagctccagctcggcgctggcggcaaaggctttcggcacatcgcctaacgccacgcgatcctgcgggcgtttcggcccggccaggctggcctcgacatcgcccatatccagttccagcgtactggtaaataccggttcgtcaccgggattacgccacattccctgcgccttcgcgtaggtttcaaccagctcgaccagatcgtcgctacgtccgcttaatcgcatatattccagggtgatggcgtcaatggggaagaaaccacaggtggcgccatattccggcgacatattagcgatagtcgcgcgatccgccaacggcagcgaatccagaccgtcaccataaaattcaacaaatttacccacgacgccatgcttacgcagcatttgcgtgacggtgagcaccaggtcagtggcggtgatcccctcccgaagcttaccggttaacttaaagccgacgacatccgggataagcatcgacacgggctgaccaagcatcgccgcttccgcttcaataccacccacaccccaccccaatacgcccagaccattaatcatggtcgtatgggagtcagtccccaccagcgagtccgggtaagcaatccactccccgtcctgtaattcgctccagacggctttacccaggtattccaggttaacctgatggcaaatgccggtgccgggcggcaccacgctgaaacggctgaatgcctgctttccccatttcaggaacatataacgctcatggttacgttccatttccagccgcacgttttcttcaaacgcatcatcatcgccgaaatgatcgaccgtcacagagtggtcaataaccagatcaaccggcgataacgggttcactttcgacgtatcgccgccgaggcgtttaacggcttcacgcatcgctgccaggtcgacaacggcaggcacgccggtaaagtcctgcatcaggacacgggcgggccgccaggcaatttcacgatcggcatgggcatttttaagccaaccggccagcgcctgaatatcttcatcagtcacagattcgccgtcctgccagcgcaacaggttttccagtaacactttaagtgatttgggcaaacgggcgatatcgcccagggatttggcagccagcggcagactgtagtaatgatacgttttatctttggcctgcaatgtatccttactggcttctcgtagggttgacgacatagctcctccttaaatgacagggttgcgttaccctgattctccacagggttgtattaaagataacacaaacaaaatgtaacgttttgataacaacccaaattgctaaaagaggagaaacctaacaggcgagaagcgaagatgaaaaagcccgataaataacgcattatcgggctttgacgagattagacggcaatccagattaactcggcccagaacagtagcgataatataaacgcgccagtccatgaccaatactttatatttgacgttaacataggcgacaccaactgtgtttaatcaatactgagaggcgctcagcacacggttgctgcggtgtaataagacagcgttaataaaacagtaacgccaataaaaagacgaatattatttttgtgacacctcgtcagcaaaagcatcaataaatgcccgctgctgcggtgtgggcgtccagtgttgcggaacagaccgaaaaacggtcgtatccggggtgttatcatcgtcaccagattgaatcgggggcgcgaccacgcgctcgcgttccgacgtaatgctcacttagccccaccaatgccagataacaagcgctaccactacccagaacaacgcagaacccacaaaaaccgccagccatgctttacgtttgagctcagggtcgcggcgcggttcctggttttcagaaggcattactaacctcatgctatcggtatcacttatcatttcagcaccaaacaatcggtacaattaatcatcagatgagacaaatcctaaataaactttagtcaaaaatccagtcaatttacgaatcgttgccagtgaataaatcaatcttttgactcaagataactatttggaaaaagaaactggcgggacgggtaattcaacactattttgctgatcattacccgtaatacttcgagggatattgcaaaaggcggctttgtctgccatgccactacgacacaaaccgacggtgatattacttttcaggcagctttatatcctgaaacatcgcttcaatttcttcattagaacgcaacgccaccgccgtatccaccacatcacgcgtcagatgtggcgcaaaacgctggataaaatcatacatatagctgcgtaaaaaagtactacggcgaaaaccaatttttgtggtgctgtggctaaaaatatcgtgcgcgtcaatccgcactaaatcaggatcggcaagcggatcgaccgccatgctggcaatgacgccaacgcccagtcccaacctgacatacgttttaatcacatccgcatcggttgcagtaaagacgatccgcggcgttaatcctgcgcgattaaaagcggtatccagttcggaacgcccggtaaagccgaaggtatacgtcaccagcggatactgcgccagcgcttcgatcgttacggaagacgttgccgccaatggatgatccggcgtcaccactatcgaacggttccagtgatagcatggcaacatcaccagatcgtcatataaatgcagcgcttccgtggcaatcgcgaaatcggcgttccctttcgataccgcttccgcaatctgcgttggcgacccctggtgcatatgcagcgaaacgcgcgggtaacgctcgatgaagcctttaatcacgcctggcaatgcataacgcgcctgagtatgggtagtggcaatatagagcgagcctttatccggccaggtgtgctcgccggcgaccgacttaatggcatcgactttggaaagcacctcacgcgcaatacgaataatctcctgacctgcgggcgtcacctgagtcagatgcttaccactgcgggcgaaaatctggatgccaagctcatcttccagcatccgaacctgcttgctgatccccggctgggaagtatacaacccctcagcggtagaggagacgttaaggttatgattaaccacttcaacaatgtaacgaagctgctgcaatttcataatacatcatccagattagcgccatcaggccatcgtttatctgcagacttaatcgggctgctaatacgatttaataataaaaaaggtgttaactataaccactatatcatttatatctgaactgtatagccagcgcgataaaataataagcccgctatacccaaaataattcgagttgcttaaaggcggcaagggagtgagttcccagaagcatagataacgatgtgactggggtgagcgacaaatctgccgggagcagatttgaacgtcgcgtgcgacggcccgtcagggcgagcccatggatgggccgagtaatccgtagccaacacataagccactttaaatatgaaggggatataaaaaagggccgcttacgcggcccgcttgactatagtgacgacaggcaggggttatttcttgccttcaacccacttgccgtcgacgaagaacgctgaccatcccgtcgccttcccgtctttttccgccgcaacgtactgctgttttgttttgcggctaaagcgaacaacggttttattaccttccgggtcctgctgcggcgcatccgccagataacgcagtttttccggcaggcgatcgcggaaccggtacagctcctcgactaatggcgcgcgagtttcgcgtgatttcgggaacgtattggccgccaggaatatccctgcggcgccatcgcgcagcacaaagtacgcgtccgatttttcacacggcagttccggtaatggaacaggatcttccttcggcggcgcaacttcgccgttacgcaagatcttacgggtatttttacattcgtcgttagtacaggccatgtacttaccaaaacgccccattttcaggtgcatttcggaaccacatttctcacactcaacgatcgggccgtcataccctttgatgcgaaactcgccttcttcaatctcgtagccgtcacaggtcgggttattaccacacacatgcaatttacgcttcggatcgatcagatagctgtccatcgccgtaccgcacttctgacagcgccgcttggcgcgcagggcgttggtttcggcgtcgtcgccttccagcacgttcagaacttcattttccggcaccaggttaatggtcgttttacaacgctctttcggcgaaagcgcataacctgaacaaccaaggaaaacccccgtactggcagtacgaattcccattttacggccacaggttggacagtcgatgctggtcagcaccatctggttaggacgcatccccccttcttccggatctttctcggctttatcgagctgctgagtaaaatcgctgaagaagttatccagtaccgctttccactcggcctggtgattcgcaacctgatccagactatcttccatctgcgcggtaaaatcgtagttcatcaattcgcggaagttttcttccagccggtcggtgacgatttcacccattttttccgcatagaagcgacggttttcaacgcgaacatagccgcgatcctgaatggtcgagataatcgacgcataggtagacggacgaccaataccacgcttctcaagttctttaaccagagaagcctcgctgaaacgggctggcggtttagtaaagtgctgagcaggcgtcaattcaagtagcgtcagcgcatcgcccttattcacggcaggcaatgtgcgatcttcatcgcctttacgcagcgccggcatcacttttgtccagccgtcaaagcgcaaaatacgcccacgcgctttcagacggaattcgcctgcgccaacggtaagcgtagtggagtcatattgtgctggcgtcatctgacaggcgacaaactgacgccaaattagctgatacaacttctgcgcgtcagcctccatgtctttcagagactccgccatgacagcaacgtcggaaggacggatcgcttcgtgcgcttcctgagagttttctttgctggcgtactggttcgggttatccggcaggtatttcttgccgaaattatcgccaatataaccgcgcaccatgttgaccgcatcctgactcaggttggtggagtcggtacgcatataggtgatgtagcccgcctcatacagacgctgcgccatcatcatggttttcttcacgccaaagcccagccgggtgctggccgcctgttgtagcgtggaggtgataaacggcgcgccaggtttgctgctggtcggtttgtcttcacgctccagtacgctatagcgcgctttttccagcaagctgacggcggcaagcgtctgctcgcgatttaccggccggaatggcttgtcgttctgatgcgtcacctgtagcggtagtgcctcgccagacggcgtcgtcgtattagcgtcaatttcccagaactcttccggaacaaacgctttaatctcgcgctcgcgttcaacgaccagacggaccgcgacagactgaacgcgacctgccgacaaaccacgggcgatctttttccacagcagcggcgagaccatatagcctaccacgcgatccataaagcggcgcgcttgctgggcgttgaccctgttaatgttcagctcgcccggctgttcaaacgcctggcgaatggcatttttggttatttcgttaaagactacgcgactgtagcgcgcgtcatcgccgccgatcacttcccgcaggtgccatgcaatggcttccccttcgcggtcaaggtcggttgcgagatagatgtggtcggctttttccgccaactgtttcagttcagagacgaccttctctttaccgggcagcacttcatagtgcgcatcccagttgtgccacgggtcaacccccatacggttgacgagagcgccacgttcatcctttttgggctttttagccgttttggtggaggtagagtcggcgctctttttagctgctgagccactggtcggcaaatcacggatatgacccacgctggatttcaccacgtagtcattacccagatacttgttgatcgttttggcttttgccggggactcaacgatgacaagagctttacccatattcacctttacctaagttgattcttccaggaatgcgtcgcacgttgattcaccttccactggcgacgagacaacgatatatggtctctgcgtctgcggatatcaaccccttgtactggctttgtgtacgaaatgtaaccctcaggtgactgagttaacaggcttttttgcacacacgcgctatagcacgacggaattttggtcgaatgtcaagcaattctgttgccagattgacgaaagcgtcacactgtacctgataaaattcgatacgcaactttattagcatgcaaaaacaaatcttgccagtgaacgcaacatgacaaatccatcaatttcctgtgagaatatttgcccatcagaagtgctcagcgtagactaatctccttgtttaaggagtaaaaaatgcataaagagacgcaacctatcgatcgcgaaacactgttgcttgaagccaacaaaattattcgggaacatgaagacacgatggcaggtattgtcgccaccggcgtaacgcagagaaatggcgtgctggttttcagcggcgattactttttagacgagcaagggttaccgacccctaaaagcaccgcggtgtttaacatgtttaaacacctggcgcatgtgctgtctgagaagtatcacctggttgattaatccatgccggatggcgctgaatgccatccggcaatagcggtttacatcaacggcttttgtccacgctgccaccagcgcagcagcagccgatccgcgctttccgccgcgctgccggtaacacgatcgatcagttttttacgctgcatatagcgcacattcagcacctcgcgcccttccatcaggccgaggataacctcatcgctggtgttaatctcatcaaccagtcccttctccagcgcctgctgaccgtaccagtgttcgcccgtggcgacctgttcaatgtccagagccggacgcatccgctgcacaaactctttgaacagatggtgcgtttcgttgagatcttcacgaaacttctgccgcccttcttccgtattctcgcctaacaaagtcagggtacgtttgtactgccctgcggtatgcagttcaatatcaatgtctttacttttgagaaagcggttaaagttcgggatttgcgcgacaacaccaattgaccccacaatagcaaacggcgccgcgataattttttccgccacgcaggccatcatatagcctccgcttgccgcgactttatccaccgtcacggtcagcggaatatttttatcgcgcaggcgctgcaattgcgatgccgccaggccatagccgtgcacaacgccaccggggctttccagacgcacaaccgcccgatcgccgggtttcgccactgccagcaccgccgtgacctcttcgcgtaacgcattaacttcgtgagcgtccatactgcctttgaaatctatcacccatacgcgcggtttgtccgatgtcgcaatgtcccccagcttcgctttcgctttggcggctttcgcctcctgcttatgcttttttttctgcgctttatgccacagtttttgctgatggccatccatcaacgccgcagcaaggtcatccttcatctcctgatactgctcactcaaattggtcacgcgcagctcgccgcgctgacgtttgcgttgcgtagcattcacgatcagcagcacaatgacggcaatggccaccacaacggtgacgatttttgccaaaaataagccatattcagacaacaattccacgactcccaccttgattaaataacgcgacttgcgctcagtgtacaacaggcatcgaagtcagtctctcttcatccgtatgcctgttgaggaagaaaaagtatgacaagacgttcattttacggcgttatcgcccctgtctgattgaaaaaaaaggcgctttcaggcataaacccgaaaagttaacgcgaagataagacaacctggcaggacggtgcaccacaccgttgaggagtagccatgcattaccaaccgaaacaagatctattgcaaaaccgcattattctggtcactggcgccagcgatggcattgggcgggaagccgcgctcacgtatgcgcgttacggcgcaacggtgattctgctgggacgcaacgaagagaaactgcgtcgggtcgcgcagcacattgctgacgagcaacatgttcaaccacagtggtttacgctcgatctgctgacctgcaccgctgaagagtgccggcaagtggccgaccgcatcgccgcgcactatccccgcctggatggcgtcctgcacaatgccgggttactgggggaaatcggcccaatgagcgaacaagatccgcagatctggcaggatgtcatgcaggtaaacgttaacgccacctttatgctcacccaggcgctgttaccgttattattgaagtccgatgccggctcgctggtctttacgtcatcaagcgttggccgtcagggacgcgccaactggggcgcctatgccacctcgaagtttgctactgaaggaatgatgcaggtgctggcggacgaataccagaaccgttctctgcgtgttaactgcattaacccgggcggcacgcgcaccagtatgcgcgccagcgcctttccgacggaagatccacagaaattaaaaacgcctgccgatattatgccgctttacctgtggcttatgggcgacgacagtcgccgtaaaaccggtatgacctttgacgcccaaccgggccgtaaaccaggaatcgcccaatgagtgatgaacgttatcagcagcgccagcagaaggtaaaagatcgggttgacgcccgtgtcgcccaggcacaggaagagcgcggtattattatcgtgtttactggcaatggtaagggcaaaaccacggcggctttcggaactgccgcccgcgccgtaggacacggtaaaaacgtaggcgtggtgcaatttattaagggcacctggcccaacggcgagcgtaatctgctggaaccgcatggcgtcgaatttcaggtgatggcaacgggatttacctgggagacgcaaaatcgcgaggcagacaccgcagcatgtatggccgtttggcagcatgggaaacggatgctggccgatccgctgcttgatatggtagtactggatgagctgacctatatggtggcgtatgactatttaccgctggaagaggtcataagcgcgctaaacgcgcgccctggtcaccagacggtgattattacaggtcgcggctgtcaccgggatattcttgatcttgcggataccgtcagcgaactgcgtccggttaaacatgcttttgacgcgggcgtaaaagcccagatgggaattgattattaaccgtaggccggattaaggcgtttgcgccgccatccggcacaaaccctcttgtctgatgatcctcggcctatagaccgcggtagagattacccgttgttattacgcccaccggagcggcgtccgccagctatctggctgtggcgttttaccgcccgacggatctggttcgctttcatacgacgacggtctttttcgacggcaaccttcgacgaggtttccggcgggagctctaccagaccacgcagatagttcgtttgcgcgaggtcgagctcagtccagccgccgcgcggcaggcctttcggcagcgggatatcgccgtaacgaacgcggatcagacggctgacctgaacgcctaccgcttcccacagtcggcgaacttcgcggttgcgcccttccgtcagcgtcacgttataccactggttaatgccttcgccgccgctgaatttaatggtcttaaatgccgccgggccatcttccaactgtacgccacggcttaaatcacgcagtttcgattcatccacctgaccgaacacgcgcacggcatattcacgttcaacttcgcgactaggatgcatcaggcggttcgccagttcaccgtcggtggtaaacaacaatagcccgcaggtgttgacatccagacgtcctaccgcaatccaccgcgcgccgcgcagtttcggtaagcgatcaaaaacggttggccgcccttcagggtcattgcgggtacacagttcaccttctggtttgtaataggccagaacgcggcaaatttgttccgccgactctttcaccgaaatcaggtgaccgtcgatacggattttcaaaccgggagtgacttcaacacgatcgccaagcgtggcgattttaccgtcaacgctgacacgtcccgcttcaataatggattcgatttcacggcgagagccgtggccagcgcgcgccagcactttttgtaacttttcgctcatagagcttccttcaggtgtcgccttcacaggcgtcgaacaggagaatgaacggcgcgttgccgcgccattttaaggccgcgtagtatacaggcttacgcccttataagaaaggtgtaacgtcgccgacgccttcgcgcagcaccaccggggagtcattggtcaaatcgattaccgtggtaggctgttgaccgaggtaaccaccgtggatgatcagatccacctgcttctccagccgatctttaatctcctccgggtccgactcggtaaaatcgctgccaggcagcatcaacgacgtcgagagcatcggttcgcccagcgtatccaataacgccaacgcaatcgggtttgacggtacgcgcaggccgatagttttacgcttttcctgcaacagacggcgcggcacctcttttgtccccttcaggataaaggtgtaattacccggcgtattgtttttcatcagacgaaatgccacgttgtcgacgtaggagtaggtcgacaactcggacaaatcgcggcacatcagcgtgaagttgtggccgtccggcagatgacggatgcggcaaatgcgctccattgcgcctttgtcttcaattttacaaccaagggcatagccggaatcggttggataaacaataacaccgcctttacgcacaatgtcgacggcctgattaatcagccgttgctgtgggttatccggatggatataaaaaaactggctcatacttccctcactgtgatatttgcggctgttcccatgtctgccatacgccttcaacgccagcgggcagccagagtttacgccccaactcaatccacgggcagggctgatggaaatcagatccaagcgatgcccataaatgatgctgacgcgcaagcgtcgccagttgggtgcgttcattgggcgattgttggcactgcgccacttccatcgcgtcgccgtgatggtcggcaaaatgcgccactaatcttttcagccacttagcgctaaggtcgtagcgtcccggatgggccaacaccgccttaccgccagaatgatgaatgacatcaatagcttgttctattgtacaccactgcggcggaacgtaaccggttttcccacgcgcgagatattttttaaaaacatccgccatggtcgcggctttgccgcactccaccagaaagcgggcgaagtggccgcgcgtcaccgcgccgccattggccagtctcaatgccccttcccacgcgccgggaatatgggctttttccagacgctccgcaatgagccgaccgcgtgcctgacgccgctctgtctgctgcgccagaaaatcgcgcattgccggatgcgcaatatcaatattcagacccacaatgtgaatctcatgattctcccagaccgttgaaatctccacgccgggaataagattcagggccagtccggaacgtgaaatttcttctcttgccgcaggaatcgcggctgtggtgtcatgatcggtaatcgccagcgtgccgactcgcatctctaccgcacggtgtactaatgtttctggcgtcaacagtccatcggacgccgtggtatgactgtgcagatcgtaaatcactgcgtaattcgtgtcgctcaaggcggctcccatagagataaagttatgtcatgtacatcataacggttccggcaaatatactgaaataggtgttgacattattccattgaactagttaactagtacgaaagttcacatgaagagggtatctaaaatggcagcgacatttgcattacacggttggtggcgcacttcctgatagcgggcggtgtatgaacagctgtaatcagccaaacgatacccggcccgcctgttaagcgggcttttttttgaacaaaataatgagaataaccatgcaaacaccaaaacccacgctcgaactgttgacctgcgatgccgcctatcgggaaaacccaacggcgctttttcaccaggtctgcggcgatcgcccggcaacgctgctgctggaatccgcggatatcgacagtaaagatgatttaaaaagcctgctgctggtagatagcgcgctgcgcattaccgctttaggtgacactgtcaccattcaggcgttatctgataatggcgcctcgttattgccgctactggataccgccctgcccgctggcgtggagaacgatgtcctgcctgccggtcgcgttctacgcttcccgcccgtcagcccattattagatgaagacgcccgtttatgctctctgtcggtatttgatgcgttccgtctgttacagggagtggtgaacataccgacgcaagagcgggaggctatgtttttcggcggtctgtttgcctacgacctggtcgctggctttgaagcgctgccacaccttgaggctggcaataactgcccggactactgcttttatttagcggaaacgctgatggttatagatcatcagcaaaaaagcacccgtattcaggccagtctgttcaccgccagcgaccgggaaaaacagcgcctcaacgcccgcctggcgtaccttagccaacagttaacccagcctgcgccgccgttgccggtgacgccggtgccggacatgcgctgtgaatgcaatcagagcgatgacgcgttcggcgcggtggtacgccagttgcaaaaagccatccgcgcgggcgagatatttcaggtggtgccgtcgcgccgcttttcactgccctgcccgtcgccgttggctgcctactacgtgctgaaaaagagcaaccccagcccgtatatgttctttatgcaggataatgatttcacgcttttcggcgcgtcgccggaaagctcgctgaaatatgacgcagccagccgtcagattgagatttatcccatcgcgggtacccgtccacgcggtcgccgcgccgatggtacgctggacagagatctcgacagccgtattgagctggacatgcgtaccgaccataaagagctttccgaacatctgatgctggtcgatctggcgcgcaatgacctggcgcgcatctgtacgccgggcagtcgctacgttgccgatctgacaaaagttgaccgctattcatacgtgatgcatctggtttcccgggtggtgggcgaactgcgtcacgatctcgacgcgctgcacgcctatcgcgcctgcatgaacatgggcaccctgagcggcgcgccgaaagtacgcgccatgcagttgattgccgatgcggaaggacagcgccgcggcagctatggcggcgcggtcggttacttcaccgcccacggcgatctggacacctgtattgttatccgttccgcgctggtggagaacggtatcgccaccgtacaggcgggtgccggaattgtgctggactctgttccgcagtctgaagccgatgaaacccgtaataaagcgcgcgccgtattgcgtgctatcgccaccgcgcatcatgcacaggagaccttctgatggctgatattctgctgctcgataacatcgactcgtttacctggaacctggcagatcagctacggaccaacggtcataacgtggtgatttaccgtaaccatattccggcgcagacgcttatcgatcgcctggcgacaatgaaaaatccggtgctaatgctctcccccggtccgggcgttcccagcgaggcaggctgtatgccggagctgctgacccgactacgcggcaagttaccgatcatcggcatttgtctggggcatcaggcgattgtcgaagcttacggcggttatgtcggtcaggcgggagaaatcctgcatggcaaagcctccagcattgagcatgacggtcaggcgatgttcgccgggctggcgaatccgctaccggtcgcgcgttatcattcgctggtcggcagtaatgttcctgccgggctgaccattaacgcccatttcaacggcatggtgatggcggtacgtcatgatgcggatcgcgtttgcggttttcaatttcatcctgagtccatcctgacgacacagggcgcgcgtctactggagcaaacattagcctgggcgcagcaaaagctggaaccgaccaacaccctacagccgattctggagaaactctatcaggcgcaaacactgacgcaacaagagagccatcagttgttttcggcggtcgtccgcggcgaacttaagcctgaacagctcgccgccgcgctggtgagcatgaaaattcgcggcgagcatcccaatgaaattgccggcgccgccactgcgttactggaaaatgccgccccgttcccgcgcccggagtatctgtttgcggatatcgttggtaccggcggcgatggcagtaacagtatcaatatctctaccgccagcgcctttgtcgcggcggcctgtggactgaaagtggcgaaacacggcaaccgtagcgtgtccagcaaatcggggtcatccgatctgctggcggcgttcggtattaatctggatatgaacgccgataaatcacgtcaggcgttagatgaactgggcgtctgtttcctgtttgcgccgaaatatcacaccggattccgtcacgcgatgccggttcgccaacagttaaaaacgcgaaccctgttcaacgtactcggcccgctgatcaacccggcgcatccgccgctggcgttgattggcgtctatagcccggaactggtgctgccgattgcggaaaccttacgggtactgggctatcagcgcgcggcggtggtacatagcggcggcatggatgaggtttcgctccatgcgccgacgattgtcgcggagctgcatgatggcgaaattaaaagctatcaacttacggcggaggattttggcctgacgccttaccatcaggatcagttggctggcggcacgccggaagaaaaccgtgacattctgacgcggttattacaaggtaaaggcgatgccgcgcatgaggccgccgtcgccgccaacgtggcgatgctgatgcgtctgcatggtcaggaagatctcaaggccaacgcgcaaaccgtgcttgatgttctgcgcaacggcaccgcatatgacagagtcaccgcactggcggcaagagggtaaataatgcaaaccgttttagcgaaaatcgtcgcagacaaggcgatttgggtagaagcccgcaaacagcaacagccgctggccagttttcaaaatgagatccagccaagtacacgccatttttatgatgcgctccagggcgcgcgtaccgcctttattctggagtgtaagaaagcatcgccatcaaaaggcgtgattcgcgacgatttcgatccggcgcgtattgccagtatttatcaacattacgcctcggcgatctcggtgctcaccgacgaaaaatattttcaggggagcttcgattttctgccggtcgttagccaaagcgcgccgcagccgattctgtgtaaggattttattatcgatccctatcagatctaccttgcccgttactatcaggccgatgcctgtttactgatgctctcggttctggatgacgaacagtatcgccaactctccgccgtcgcgcacagtctgaaaatgggcgtgctcacggaggtcagtaatgacgaagaacgggagcgcgcgatagcgttaggcgcaaaagtggtaggtatcaacaatcgcgatctgcgcgatctgtcgattgatttgaatcgcacccgccagctggcgccaaaactgggccacggcgtgactgtcatcagcgagtccgggattaacacctatggtcaggtacgcgaactgagccacttcgccaacggttttttaattggctccgcgttaatggcgcatgacgatcttaacgccgccgtccgtcgcgtgctgcttggcgaaaataaagtctgcggcctgacccgcgcccaggacgctaaagcggcctgtgacgctggcgcaatatatggcgggttgatttttgtgccctcatctccgcgcgcggttagcgttgagcaggcgcgagaagtgataagcggcgcgccattgcagtatgtcggcgttttcaagaacgctgatatcgccgatgtttgccagaaagccgccgtcctgtcgctttctgccgtacagctacatggcagcgaagaccaggcgtatgtcaacgcgctgcgcgaggcgttgccgaaacaggtgcaaatctggaaggcgctgagcgttagcgatgcccttcccgcacgcgattatcaccatgtcgataaatacattttcgacaatgggcaaggcggcagcgggcagcgcttcgactggtcactgctacaggggcaaccgctggataatgtgttactggcgggcgggctggcggccgataactgcgtccaggcggcgcaagtcggctgtgccggtctcgattttaattcaggtgtggagtcacagccgggcatcaaagatgctcgtcttctggcctcagtttttcagacactgcgcgcatattaaggaaaaaacatgacaacacttctcaacccctactttggtgaattcggcggcatgtatgtgccgcagatcctgatgcctgcgctgaaccagcttgaagaggccttcgtcagcgcgcaaaaagatcctgaatttcaggcgcaattcgccgatctgctaaaaaactacgcgggacgccccaccgcgctgacgaaatgccagaacattaccgccggtacgcgtaccacgttgtatttaaagcgcgaagatttactgcacggcggcgcgcacaaaaccaatcaggtactgggtcaggcgctgctggccaaacggatgggtaaaagcgagattatcgctgaaaccggcgccggtcagcacggcgtcgcctctgcgctcgccagcgccctgctgggtctgaaatgccgtatctatatgggcgccaaagacgttgagcgccagtcgccgaacgtcttccgtatgcgtctgatgggcgctgaggtcatcccggttcatagcggctccgctacgctaaaagatgcctgtaacgaggcgctgcgcgactggtccggtagttacgaaaccgcgcactatatgctcggcacggcggcaggaccgcatccctatcccaccatcgttcgcgagttccagcgcatgattggcgaagagacgaaagcgcaaatcctcgacaaagagggccgtctgccagatgccgttatcgcttgcgtcggtggcggctcaaacgctatcgggatgtttgccgattttattaatgataccagcgtcgggctaataggcgttgaacctggtggtcatggtattgaaaccggcgagcatggcgcgccgcttaaacatggtcgcgttggcatctatttcgggatgaaagcgccgatgatgcaaacagcagacgggcaaattgaagagtcctattccatttccgccgggctcgatttcccgtccgttgggccgcaacatgcgtacctgaacagcatcggacgcgcggattatgtctccattaccgatgatgaggcgctggaagccttcaaaacgttgtgccgccatgagggaattatcccggcgctggagtcctcccacgcgttggcgcacgctctgaaaatgatgcgcgagcagccggaaaaagagcaactgctggtggtcaatctctctggccgcggagataaagacatctttaccgtacacgatatcctgaaagcgcgaggggaaatctgatggaacgctacgaaaatttatttgcccaactcaacgatcgccgggaaggcgcttttgtccccttcgtgaccctgggcgaccctggcattgaacagtcactgaaaattattgacacactgattgacgctggcgccgacgctctggaactgggggttcccttctccgatccgctggccgatggccctaccatccagaatgcgaacttacgcgccttcgccgctggcgtcacgccggctcagtgttttgaaatgctggcgctgattcgtgaaaaacacccgaccattccgattggcctgctaatgtacgcgaatctggtgttcaataacggcatagatgcgttctatgcccgttgtgaacaggttggcgtagattccgtgctggtcgcagatgtcccggttgaagaatcggcccccttccgccaggcagcgttacggcataatatcgcgccgatcttcatctgcccgccaaatgcggatgacgatcttctgcgccaggtcgcatcttacggccgcggttacacctacctgctttcgcgttcgggtgtcaccggcgcggaaaaccgtggcgcattgccgttgcatcatctcattgagaagcttaaagagtaccatgccgcgcctgcgttacagggcttcggtatctcctcgccggaacaggtgtctgcggccgtgcgtgccggggcggctggcgctatctccggctcagccattgtcaagattatcgagaaaaacctcgcgtctcccaaacagatgttggcggagctcaggtcctttgtctcagccatgaaagccgccagccgcgcataacgggttaagccgtcagcataacgctggcggcttaatgagtggctggcgccgaaccagaatcacgattcagacgtacatcatcaatctttttggtgttattccccgtccagctttcaaaaagtctgaagtcaatttttgctaagaaaactcctaatcacgccgaaaaatttagcgttttcacgtcaatttcccccgcctttatgtaaagaaatgtcaacaaacaatgcattaacgtttccagggccgcagatagtgacgattgttattaataacaatgcaaagcatttcctgttaaatcgcttattctaaaagaaaatatagaatatattatctctaaaccattttttgtgcgttatttacgcggtaaatcacaactatttccgtcaatttgactaatcggtttaaccaactaattttaatagggtgtcgacacggttaaaaccgattttttcagcaagcaacgagacaggagaaataatatggccgaacatcgtggtggttcaggaaatttcgccgagaatcgtgaaaaagcatctgaagcgggccgcaaaggcggtcagcatagcggcgggaatttcaaaaacgatccgcaacgagcttctgaagccggtaaaaaaggtggtcagaatagtcacggcggacgtaaatccgataattcctgatttactgtaatgtaaatataacacatgcttttatcaagcaatctgcgagtcttctggctcgcagtattttgcccaggagaattagatttatgaatatcaaaaccgttgaagacctttttatccatctactttcagatacctatagtgcagaaaaacaattaaccaaggctcttcctaaacttgccagagccacgtccaatgaaaaattaagccaggcctttcaatctcatcttgaagaaacccagggtcagattgaacgtattgatcagatcgtcgaatctgaatctggcattaaactgaaaagaatgaaatgcgtcgctatggaagggctgattgaagaagccaatgaagtcatcgaaagtacggagaaaaacgaagtacgcgatgcagcgcttatcgccgcggcgcaaaaagtcgagcattacgaaatcgccagctacggcacgctagccaccctggccgagcagctcggctatagcaaagcattaaaactgctcaaagaaaccctcgacgaggaaaaacaaactgatttaaaacttaccgatttagcagtcagcaatgttaataaaagtgctgaacgcaaatcgaaataatatttttaattatcagcttgcatgattccgattttattatcggagcagattatcacgcattgaggaatgtaaaatgaattatactgaacattatcatgactggcttcgtgacgcccatgccatggaaaaacaggcagaatcgatgcttgaatctatggccagccgtattgaaaattatcctgatataaaagccagaattgaacaacatattagtgaaaccaaacatcaaattaccatgctcgaagaagtgttggaccgtaatggcatttcccgttcggtgttgaaagactccatgagtaaaatggcagcaatggggcaatctatcggtggcatgttcccttccgatgaaattgtcaaaggttcaattagcggttatgttttcgagcagttcgaaattgcttgttatacctccctgctggcggcggcaaaaaaagctggcgacactgcctcaattccgacgattgaagccattctgaaagaagaaatgcaaatggctgactggcttatcaaacatattccgcagacaacggaacaatttttactgcgatctgaagcagatggcgttgaagccaaaaaataaataataagcaggaggcaatatgtttcgacacgtaaaacaacttcaatatactgtgcgagtgagcgaacctaatcctggattagcgaacctgctgctggaacagtttggcggcccgcagggcgaactggcggccgcctgccgctacttcacgcaaggtttaagcgatgatgatgccggtcgtagagaaatgttaatggacatcgccaccgaggagctgagtcatctggaaattatcggctcactggtaggaatgcttaataaaggcgctaaaggcgagctggcggaaggtaccgaaaacgaagcggaactttatcgctcgctgacgcagaatggtaatgatagccatatcacctctctgctgtatggcggcggcccggcgttgacaaactccggcggcgtaccgtggaccgcggcttatattgatactatcggcgaagtcacagccgatctacgctcaaacatcgcggcagaggcgcgagcgaagatcatttatgaacgcctgattaatctgaccgacgatcctggcgtaaaagacacactcagtttcttaatgacccgtgaagtcgcgcaccagctctcttttgaaaaggcgctgtattcgattcgtaacaacttcccgccgggtaaattaccgccggtagaacagtataccgacgtgtactacaacatgtcgcaaggcgacgatccgcgaggtagctggaatagcgatgagaacttcaactatgtcgcagaaccgatgcctgctgttgatggcggcgatggcctggcgacagtgaaattgccgcgcgagcagatggcgctgctcaaagcgatggcagaaagaacgaaatcggaccccaccgttgatcctctcactggcgcagaactaggctgcggcgaaccgaaagaagacaagtgagttccgacaagtaaaatccgtgtgtcatgtccttttttgaccccgcctggcggggtcttttttcgtcacaacatcacgcgattagaaacgatagcctgccgagaacataaatacccatgggtccagacgcacgctgtcatgatgctgaacgccgcccattttataattggcggtagtatcaatatccatgtaccagacagaggcgccaattaaccagtcgcggttaatcaggtaatctaccccaacttgccctgccgcgccccaggaatccttaaagctcagatcggacagcccggcatttttaccattatcgttaaagtcgttatcgaagaaggtggtgtagttcacccccacgccgacataaggacgcactttgctgctggaatcgccgaagtaccactgcgccattaacgttggcggtaacaggtggaccgtggcgatatcgcccgtcgcgcccgtacccaccttatggcggaacggcgtagccgccagcaattcaaccccgatattgtccgtcgccatgtaagtgaatgtcaggccgagttgcgtgttattactcacatcaaacccgtttaaatgccccagcgtaccacccgccccttctgtaggtctgacggttgccggacctgcacgcataaagaattctccggcttcgtgcgcgaacgcgctgcctgagagaagagttgttaacgccagtgccgccactgtaaattttttcatacccgctccatcgttatggttataaaagcgtgatgaatatacccacaatgaagtaataagtgatctaatacagatcacatttgttcttataatttaacatttattgatccagattaatttagaacttgtattgaaaatcctggttataggaattcagatcaattttgacatattcacgctatgcaaatatttgtctgctcctgttgccctggcgataaaggctggctaaggtaatcaatgtcccgcaatggcgcgtggcgttaagattcgcgaacactgcgggacagattaatttccgttgtaatctattgatacgttagttttttgcaggtgaatcatgagcgttcttaacccatgcatgacatgcggtgcctgttgtgcctattttcgtgtctccttttattgggctgaaggcgacgatgccagcggacgcgttccggcgtcattaaccgagcctgttaccccttttttacgttgtatggccggtaccaaccaaaaacagccgcactgtaaagcgctaattggcacgccgggtgaaaacgtcagttgcgctatttatgaaaaccgcccttcaacctgtcgcgaattttcgatatcgggcgaaggaggcgaagtgaatgaggcgtgtaatcgcgcccgcgcgcgatacggattaccgccgctttacaaagatatgcttttccatacaactgctgatgctgccactgtagagttatccagggtacaattgcccgcaaattaacacctgcaaaactcaaggagagtgcatgtctatcacggcgaagtccgtttaccgtgacgccggaaattttttccgaaatcaatttattactatcttgctggtttcgttgctgtgcgcatttatcacggtggtcttaggtcatgccttttcacccagcgatgcgcaaatcgcgcaactcagtgaaggagaacatctggcaggcagcgctggcctgtttgagctggtacaaaatatgacgccggagcagcaacagatcctgttgcgcgcctctgccgcctcgacgttttccgggcttatcggcaacgctattctggccggcggtatcatcctgatgattcagttagtttcagcgggacatcgggttagcgcgctgcgcgctatcggcgccagcgcccctgcattgcctaaactgtttattcttatttttctgactaccctgttagtgcaaatcggtataatgctgattgtcgttccggggattattatggccattgtgctggcgcttgcgccagtgatgttggttgaagagaaaatgggcgtgtttgccgcaatgcgcagcagtatgcgtttagcctgggctaacatgagactggtcgcgcccgcggtgataggctggttactggctaaaacattgctattgctgttcgcgcccagcttcgctgtactgaccccaaatgtaggcgctgtactggcgaatacgttgagcaatctgatttccgcagtattgcttatctacttattccgcctgtatatgttgattcgccaataatccgcaatgcgccgttacgcggcgcattcgacgctcgttgatgatggaatcgaagaatgaagcagtttctggattttttaccgctggttgtcttttttgcgttttataaactttatgacatctatgcggcgacctccgcactgattgtcgcgacggcaatcgtgctgatttatagctgggtgcgctatcggaaaatagagaagatggcgctgattacctttgttctggttgccgtcttcggcggtctgacgctcttcttccataacgatgaatttattaaatggaaggtgacggttatttatgcgctgttcgccggcgcgctgttaataagccagtgggtgatgaaaaaaccgttaattcaacgtatgttaggtaaagaactggcgttgccgcagcaggtctggtcaaagctgaacctggcgtgggcgctgttttttattgcgtgcggtctggctaacatttatatcgccttctggttgccgcaaaatatctgggtcaactttaaggtctttggactcacggcgctgacgctcatttttaccctgctgagcggcgtctatatctaccggcatctgccacaggaagataaatcataaccctcccgtgacttatcatcgccagactgcgaacgcctggcgatattttctccgcctttacgccctgcgctttcccgtcagtacctttattcccactattctccacacaaaattcatagtagcatcgcggctgtaattttttctgatagtcggttttacaatgacaacaatggataatactcctcagggcgagctggttttacgtacattggccatgcctgccgataccaatgcgaacggcgatatttttggcggctggctgatgtcgcaaatggatattggcggcgcgatactggccaaagagatcgcgcacggtcgggttgtaaccgtacgcgtggaaggaatgacatttctgcgccccgtcgcggttggcgatgtcgtatgctgctacgcgcgctgcgttaaacgcggtacgacgtctattagcataaatattgaagtctgggtgaaaaaagtcgcgtcagaaccgattgggcagcgctacaaggccaccgaggcgctgtttatttatgttgccgtcgatccggacggtaaacctcgcccgctcccggttcagggttaagtatacccgcttacgccgccagcaggtgatggtatattcctggctggcggcgccagagattactcaatctgcgccgtaccgttcagacggaagataatattgaccaccagcccggaacccggcttgcctgcttcatagcgccattttcgcatcgcattcttaacttcacgctcaaacatattggctggctgcgcggatagaatctgtacattttccactcgcccagcagaggtcacgtcaaacttcacctttacgcggccttcaatacgtaacgcctgtgctcgcgccggatactgcggctggttacggctcagagcgcgaggtccagtgggcacgctcaccgcgggcttgctggtcgccgatgcggtgctgcttgttggccgcaccggggcgctattttcaaacggtgaggcaggacgcggcgcggctggtttgacttcgcgcttcggctgctcttcaacctttttcaccggtttcggttttggcttgggttttggcttaggtttgggtttctcaatcaccacgggcgcttctttaggcggttcagggatcggctctggctccggttcgggttcgggttcaaccaccggctccggcggcggctgaaccgcctggggcggctccaggtcagcgggtgaaaccattgtcaccgtgataggctgcgctggcgcaggcaattcaataacctgatgtaccgaggtatagagcaaacctgccactacagcaccatgaatgcctacggaaaggagtgtcggccagggaaagcgacgaggtaaatcaagggtcattgaagtcataatcgtttcagttgaaaaaccagagctgaattttaaatgcaaatagcaatcatattcaataaggcattgccgatagcggcatttaaaagatgatatcgcacaaaaacaccacacaaaatgtgcatgtttaacaaagtcggtatctttacattgcagttaaatgccctttccaataacgtaatcagcaacttttaccgattaaggagctctacccgtgctgtatgttatttacgctcaggacaatgccaactcgcttgaaaaacgcctctcggtacggcccgcgcatctggcgcgcctgcaacttctgcatgatgaagggcgattattaactgccgggccgatgcccgcagtggacagtaacgatcctggggtagccggatttaccgggtcaacggtgattgctgaatttgaatctttagaagcagcgcaatcctgggctgatgcggacccctacgtcgccgcgggcgtctatgcgcaggtttcggtcaaaccgtataagaagatcttttgaaaaggatggcctgttgggcaccgcatacggtgccctttctggctcacacaccgtgaatcgcaaagagtaatgaattacgctgacgattaaagatgcatttcctgatggtatggatacgcatattacggcgtgattgcccttcaagccaacgcgctttacggcggctcgcctgacgtagcattcgccagcgccccacttccgttctactacgcttcatgtttacgactctcactgtaacagaagcgccattataccccctcgccggatgcagaccagcgcttttcccgtgtttttatttgccatgtgaatcctgacgcgtaaactcttaacaacacgctttctaaaggatttttaaagttatgacaaccttctacaccgtggtgagttggctggtcattttgggatactgggttctcattgccggcgtcacattacgtattctaatgaaacggcgcgcagttccctccgcaatggcctggttgttaatcatctatatccttccgctggtcgggatcatcgcctatttgtccgtgggcgaattgcatttaggcaaacgtcgcgccgagcgtgcccgcgccatgtggccgtctaccgccaaatggttgaatgacctcaaagcctgcaaacacattttcgcgcaagaaaacagtagcgtcgcatcgtccttgtttaagctgtgcgaacgacgtcaggggattgcgggcgtcaaaggcaaccagttgcaattgcttaccgactccgatgatgtcatgcaggcgcttattcgcgatatccaactggcgcggcataatatcgaaatggtgttttacatctggcagccaggcggcatggcggatcaggtcgctgaatcgctaatggccgccgcccgccgcggcatccattgccggcttatgctggactccgcgggtagcgtcgctttcttccgcagcccctgggcggccatgatgcgtaacgctggcattgaagtcgtagaggcgctgaaggtgaatctgatgcgcgtctttttacgccgtatggatcttcgccagcaccgtaaaatggtgatgattgacaattacatcgcctataccggcagtatgaatatggtggacccgcgttttttcaaacaggatgccggcgttggacaatgggtcgatttgatggcgcggatggaggggcccgtggcgacagcaatggggattgtttactcctgcgattgggaaatcgagacgggtaaacgcattctgcctcccccgccggatgtgaatattatgccgtttgagcaggccagcgggcataccattcataccattgcttccggtcctggatttccggaagatctcattcaccaggcactattaaccgccacctatgctgcgcgcgaatatttaattatgaccacgccatatttcgtccccagcgacgatctgctgcacgctatttgtaccgctgcgcagcgcggcgtggatgtcagtattatcctgccccgtaaaaatgattcactgctcgtcggctgggccagtcgcgccttttttagcgagttactggcggcgggcgtgaaaatctatcagttcgaaggcgggctgttacataccaaaagcgtgctggtcgatggcgaactgagcctggtcggtaccgtgaatctcgacatgcgtagcctgtggcttaatttcgagattacgctggtcattgatgatacgggtttcggcgccgatctggctgcggtacaggacgattatatttcgcgctcccgcctgttagatgcacgtttgtgggtaaaacgtccgttatggcagcgtattaccgagcgattgttttacttctttagtccattgctgtaaaacgtgaccaacatgagtaaacaggtagtcactatggaaatggatctgaacaatcgcctgactgaagacgaaacgcttgagcaggcttacgatatttttcttgagctggcggcggataatcttgatccggctgatatcattctgttcaatttgcaattcgaggagcgcggcggcgcggagttgtttgatcccgctgaagactggcaagagcacatcgattttgacctgaatccagacttttttgccgaggtggtaattggcctggcggataccgaagacggcgaaattaacgacatttttgcccgcgttctgctgtgccgggaaaaggaccacaagctgtgccatattctctggcgcgaataagcggttcaggccggatggcgtctgattgcgccctccggcaagcctgtttaatccggtagcttactgccgcatcggttacaatattgcgcgctatgttcatgctggctttgctggcactgcggacattttcgctgccagtgacgtttttgaaacgcgctgctcatgtgcgtggtaatcagtcctgtaggaatcgcaatcaccgaatagccaatcaaaataagcaccgacgcgacaatacgtcccagcggcgtatgcggcgtaatatcaccgtaccccacggttgtgactgtcactatcgcccaatacaccgaggcattaagcgtcgtgaagccatatttcggtccttcaataagatacatcagggcaccgaaaataatcatcacgatcgcaataaatgaatagaacagaataagctgatgacgcgcgctaataatggcgctccagaatacccgcagcgatggcataaagcgtagcagtttaagaatacgcagcacgcgaatcgctcgcatagcgcgccaggcaaacatatagttcaggctaatttccggccacagccacatgacgtacagcggcaaaatcgtcaccagatcaataaatccccagaaactaaaaacgtattttgccggttcgggccagctaaacagtctgagcaagtattcaccggtaaatatcagggtaacgcagagctccagccagacaaaaatatgccattcatcaaatgtcaggtgatattccgttcctacgcctgattcaacaaaaatgaccagtacgctaagcagcgcaaacagcgcgcataacccttcaaaacggcgacctgagcgcgtagtcaaatcgaacagattatgataaagacgacggcgaaccgacgacaaagaaagtgacacggtaacctcacctaaaagaagggctgacgaattgtcagcccttgcgattataacgggtctactttaaggcaggaaacggcatggcgaaaactcccttccagcaccggtcgcgtttgcgcgcattctggcccggctatcggacagcgtgtacggaacacgcagccggaaggcgggttaatgggcgaaggtaattcgccctccagcaattgtatcttcttatttcgctccagatcgggatcgggaatcggtaccgccgacatcagcgctttggtataaggatgcagtggattatggtacacctcatcataggtgcccaattctactgcatgaccgagatacatcaccaggacacgatcggatatgtgctttacgaccgccagatcgtgcgcaataaaaatcaacgacagccccatctctcgctgtaactgctggagcaaattcaccacctgcgcctgaatagaaacgtccagcgccgacaccggctcatcgcaaataatgagcttaggttccaggatcaatgcccgggcgataccgatgcgctggcactgccccccggaaaattcatggggataacggttgatgaggttcggcaacagccccactttcagcatcatggctttcacgcggtcacgcacgtcctggcgcgaaagtttaggatgataagtgcgcagcggttcagcgataatttcgccaatcgtcattcgcgggttgagtgacgccagcgggtcctggaaaatcatctggatatcgctgcgcacctcgcgccactcatccgctttcatgcccagcagatcttttcccagccaggcgactttaccatctgtcgccttcaccagaccaataatcgcgcgcgcaaacgtcgacttgccgcagccggattcgcccaccacgcccagcgtttcgccttcatacaggcgtagcgtaacgccgtccaccgctttcagggttttcggcggttgccagaaccactgcttcccttctttgatatcaaaatgtactttcagatcggcgatttcgaggagaactttacgttgttcaatcacagcattcatagcagttcctccaccggtttaaaacaggcgcgcaagcgaccaggactaaacgcttcaagtggcggcgcattattgcagatctccatcgcatgaggacaacgcggctggaacggacaacctttaggcaaacgcaataaattgggaggattgcccggaatcgtcagcatttccgccccctcgctatccagacgcggcaccgcattaagcaggcctatcgaatacggatgaacgggctgataaaagacatcgcgcgccttaccgtattccatggtacgcccggcatacattaccaggaccttatcgcaaatacccgcgaccacgcccagatcgtgggtaatcatgataatggcggtattaaattcgcgctttagctcattaagcaaggtcataatctgcgcctgcacggtaacatcaagcgcggtggtaggctcatcggcaataagcagtttcggcctgcacaacagcgccatcgcaatcatcacacgttgacgcattccgccggaaaattcgtgcgggtacattttcatccgtttgcgcgcttccggcatttttacggcatccagcattctgacggactcttcaaaagcttccgctttgctcatccctttatgcagcatcaggacttccattaactgctccccaacgcgcatataaggatttagcgaggtcatcgggtcctgaaaaatcatcgaaatctgttctgcgcgcagcgtattcagttcgcgctcaggtagattaagaatttcacgtccgttgaaggtcgcggaaccgccgattcgaccattcgtcgccagcagtcccattaatgcgaacgccgtttgcgatttccccgatccagactcgccaacaatacctaacgtttctccagcgcgaagcgtaaagttcagatcgttgaccgccgtcacatcgccatcaggcgtagcgaacgtaacacgaagatcgtttacctccagcagtacattcgccggttgcggcgcctgagttgcggtttctgataagctcatggctgtactccttaacgatctttcgggtcgagggcatcacgcaggccatcgccaataaagttaaaacagaataacgtcaccacgagaaagccagccggaaacagcagcagccacggtgagacttccattgaatttgcgccatcgctcaataacgctccccaactgcttaacggttcctgcgtcccaagccccaggaaactgaggaaagactcaaacagaatcatgctgggcaccagcaacgatgcatacactaccactacgcccaggacgttaggcacaatatggcggatcacaatgctggcagtcgacacaccacccacctgcgcggcttcgatgaattctttacgtttaagacttagggtttggccacgcacgatacgcgccatatcaagccaggagaccatgccgatggcgacgaaaatcaacagaatgttctgcccaaaaaacgtcaccagcaaaatcacaaagaacataaacgggaacgagttgaggatctccaacaaacgcatcatcacagaatcaattttgccgcccagatagccggacagcgagccatacagcgttccgacaatgaccgccaccagcgcggcggcaatcccgaccattaatgagatacgcccgccgatggcaacgcgcaccaacagatcgcgcccggaagagtcagtgccgaaatagtgaccggacgccatatccggcgcactggacatcatgccccagtcggtatcgaaataggtaaattgcgacagcataggcgccactgtcacgaacagggctatcagaaacaggacaataagactggccaccgccgcacggttatgcataaagcgccgacgggcatcttgccaaaggctgcgaccttccacctccagcttttcactgaaattttccagcgtctcgctgtttttcttacttaacatcatcgcgagctccagtatcaatagcgaattttcgggtcgataacggcatagagcacatcgacaatggcgttaaataatatggtcagcgccccgactagaatggtcaaacttaacaccagcgagtaatcgcggttgagcgcgccattaacgaaaagctgcccaatgcccggtaagccataaatagtttcaatcaccattgagccggtaataatgccgacaaaggctggccccatataggataaaaccggcagcagcgcaggttttaacgcatggcggaagataattctgcgcatcggtaatccttttgcccgcgcggtacgaataaagttcgaatgcagaacttcaatcattgagccgcgcgtaatacgagcgatgctggcaatataggccagtgaaagcgcaaccatcggcaggatcataaattttaacgccccgccgttccagccgccgccaggcagccattgcaaggttatcgcaaagaccatcaccagtagcggcgccaccacaaaactggggataacgacgccggtcatggcaaatcccatcaccgtataatcccatcgcgtattttgctttagcgcggcaatcacgccagcgctgacaccaataatgaccgccagcaaaaaagcggcggcgccaagtttcgccgaaacggggaagctggcggcaaccagatcgttgaccgtgtaatctttatatttaaacgatggtccaaaatcgccatgcgccagctgcttcaggtagctgaagtactgcgtcatgatgggatcgttcagatgatattttgcttcaatattggccagcacttccggcggcaatgcgcgctcgccggtaaaaggactccccggcgcgaggcgcatcataaagaaagagatggtaataagaataaacagcgtcggaatcgcttccagacagcggcgtaaaataaatttcaacattgcccgtaccttctggcctgtgcctttacttcccggacgtgacaaaagatccgccagggaaagttatagtgcgatgaaaaaagacaccatgggacaaccgcagttgtcccatgtcttgccattaatgtttgataatatataagtttttcacataaatattatccagcgggtctttaccggtatacccgcccacccagggtttcaccaggcgcgcgttaacgtagtaatacaccggcacaatagccgagtctttatctaactgctgctccgctttagcgtagagttcgctgcgctgcgtatcgtccgccactttcagcgtgtcggcaatcagcttatcaaacgccgggctcttataatgcgcggtgttatttgaactgtcggacaacatggtattcaggaacgaggtcggttcattataatctgcgcaccacccggctctggcaacatcaaaggtgccctgatgacgggtatccaggaaggttttccattcctgattctccagattcacattgacgcccagatttttcttccagatagacgccacggcaatggccagttttttatgcagatcggaggtgttatacagcaggtcgaatgttaagggcttatccgccgtaaagccggcttcagccaacaatttcttcgcttcttcattacgcttttgctgggaccatttgaaccactcaggctctaccagttttgcgccatcggtatacggcggcgtgtagctataagcgggtaaatcgccctgatttttaaccttattaacaataatgtcgcgatctaacgccagtttcagcgcggtacgcacgcggacatcgttaaacggcgctttttgattattaatttcgtaataataggtacacaaataagggtctacgcggacttcattcgggatctctttcttcagtttctggaataattcgatcggcatattgttataagtcatatcgatctcgccgctgcggtagcggttgacatccgtcacctccgaagagataggcaaataagttacctgattgatgacggttttggcgttatcccagtattgcgggttacgctccagcacgatacgttcgttcaccacccagttttttaacttataagcgccgttagtgacaatattggccggttgcgtccatttatcgccaaatttttcgaccgctgatttcggtacaggagacactgaagggtggaccaacaatttgtagaaataaggcaccggctcacttaaggtcacttcaaaggtgtgatcatcaagcgcttttacccccagatcggtggcgggttttttaccggcgataatgtcatcgatattagcgatatgaccgtattgcagatagctggcgtacggcgatgccgtattaggatcggccaggcgttgccagctataaacgaaatcatgggcggtgacgggcgtaccatctgaccatttcgcattttcacgtagatggaatgtccagactttaaaatctttattttcccatttttccgcgacgcccggtgaaggatgcccctcgacatcactaattaataagccttcgaagaggtcacggctgacgttcgattccggcacgccttcaattttatgcgggtcgagagactgcacttctgatccgttattacgtaccaacgtttgcttgtcggctaactgaacgccggcgggcacgtctgccgcagtcgcggcgctggcggcgatgagcgcagtgagtattcccgctgcaatcaaactttttttcgtgatgttagacattgtgtttgtactccactcattataattactggtttttaccagcctgtttaatcccgtcagggttcctgtgcagcactggtggtgtactgccaggtctgtcactgcttttgctatcaccgactttatttattctgacgattcgttcgatcgcctttcgtcgattcggtatacgacgtacctgcccacgtcgcacgttatttctgacaaccatctaaatgaaaatacttatcaacaatgtgaaatcttctacaaaaatgtttggccgaaaagtatcaaatgcgtttctgaaccgccaattcattttacaattttgttaaccaattctcttttatggaaaaatccctgcccaaaaaaacagttaaacaatgttaaaaatctttgatttattctttataatcaataagttgaaagaaaaatatctctctgtcgcatcgtaggttatgcctgcgccagaaaacacacacaaatttaacaaatgctcattatttagcacattcatctacgatggagctgaaacaactaataacatttcaataatccttcatcaagccccagagtatggtgtgaataaaataacagacctaccgcctctcacggtctcagtaatgttgataatagtttgattaataaaaataaatagcgttagattatattagtattttttatcatttaaacgctgaatgcttatcaaagtaagaagtgttacgtgggaatgtcacaaggcggccccttagggcgccgcctgtaaatcagcaggtgggagtttagttgagcaagccggggaaaatgccttttattcctgtgacaataaattcgatgccgagcgccattaacaacaaccccatgattcgggtaataacgttgataccagtttgccccagcaaacgaaccagccacggcgccatacggaacacgccccagcagcaaagcgcaaaaagcgcaatggcaactgaaaagccaagcaaatgcgcgatgctgtgataacgcgtcccccagacgatagtggagctgatcgcccctggccccgccattaacggcagcgctaacggcacaacgccaatgctctcgcgtatggccgtctctgacttttcttgcttgttttgtttatcttcccccagcttcccgctgatcatcgacattgcaatggtgacaaccaggataccgcccgcaattctgaacgaatcaatagaaataccaaagagttgcaggatgccatcgccgaggaataaggaactccacaagataatcgcaaccgacagattcgcggtgaggttagttttattacgcgccgtggccgtctggtagctggtcatgctgatgaaaacggggataatccccaccgggttaaccagcgcaaagagcccgataaagaacttaaagtaaacaggaaaatcaaaaagcggttgaatcacggttagctccgaagcgttagccggatgaagtcaatgttcgttaatgatcaaaacgcgcagaagatacgccttttattcgcatagttcacctcttatctacgcctaatttcatccattcatcgctgttatttatatgtactcgttatgctaatccactcactcttcatgataacgatttcttaacaatttacataaaaggctaaaatggcctgctgaaaggtgtcagctttgcgtaatcttgatttagatcacacaatcgctactcagaagtgagtaatcttgcttacgccacctggacgtaacgcgttagagttaaatgatactaacgcagaagctcttttagtaaatcagagcgaaacggacgttaagtaaccacctgaatttcaggcatttatacaaagtatcgtcgatctgtctatactcacgtatcgcgcagatgatttactaaaaaagtttaacattatcaggagagcattatggctgttactaatgtcgctgaacttaacgcactcgtagagcgtgtaaaaaaagcccagcgtgaatatgccagtttcactcaagaacaggtcgacaaaatcttccgcgccgccgctctggctgccgctgatgcccgcattccgctggccaaaatggccgtcgccgaatccggtatgggtatcgtggaagacaaagtgattaaaaaccacttcgcttctgaatatatttacaacgcctataaagatgaaaaaacctgcggcgtgctgtctgaagacgacaccttcgggaccatcaccattgctgaacctatcggcattatttgcggtatcgttccaaccactaacccaacctctaccgcgatcttcaaatcgctgattagcctgaagacccgtaacgccatcatcttttctccgcatccgcgcgctaaagaagcaaccaacaaagcggcagacatcgttctgcaagcggctatcgctgccggcgcgccgaaagatctgattggctggatcgatcaaccttccgtagaactgtctaacgcgttgatgcaccacccggatattaacctgatcctcgccactggcggtccaggcatggttaaagctgcatacagctccggtaaaccggctatcggcgtaggcgcaggcaacactccggttgtcattgatgaaaccgctgatatcaaacgcgctgtggcgtctgttctgatgtctaaaaccttcgataacggcgtaatctgtgcttctgaacagtctgttgtcgttgttgattccgtctatgatgccgttcgcgaacgtttcgccagccatggcggctacatgctgcagggccaggagctgaaagcggttcaaaacgttatcctgaaaaatggcgctctgaacgccgctatcgtcggccagccagcctacaaaatcgctgaactggcaggcttctccgtaccagaaaccaccaagattctgatcggtgaagttacggtcgttgacgaaagcgaaccgttcgcacacgaaaaactgtctccgactctggcgatgtatcgtgcgaaagatttcgaagaagcggtagaaaaagcagaaaaactggtcgctatgggcggtatcggtcacacctcctgcctgtacactgaccaggataaccagccagaacgcgttgcttacttcggtcagatgatgaaaaccgcgcgtatcctgatcaacaccccggcctctcagggtggtatcggtgacctgtacaacttcaaactcgcaccttccctgacgttgggttgtggttcctggggtggtaactccatctctgaaaacgttggtccgaaacacctgatcaacaagaaaaccgttgctaagcgagctgaaaacatgttgtggcacaaacttccgaaatctatctacttccgccgtggctctctgcccatcgcgctggatgaagtgattactgatggccacaaacgtgcgctcatcgtgactgaccgcttcctgttcaacaacggctatgcagaccagatcacctctgtgctgaaagcggctggcgttgaaaccgaagtcttcttcgaagttgaagcagacccgacgctttccgttgttcgcaaaggcgctgagctggctaactccttcaaaccggacgtgatcatcgcgctgggcggcggttccccgatggacgccgcgaaaatcatgtgggtcatgtacgaacatccggaaactcacttcgaagaactggcgctgcgctttatggacatccgtaaacgtatctacaagttcccgaaaatgggcgtgaaagcgaaaatgatcgccgtcaccaccacttccggtaccggttctgaagtcacaccgtttgcggttgtgaccgacgatgcaaccggtcagaaatatccgctggctgactacgccctgaccccggatatggcgattgtcgacgccaacctggtgatggatatgccgaagtccctgtgtgcgttcggtggtctggatgcggtaactcacgctctggaagcttatgtttccgtactggcttctgagttctctgacggtcaggctctgcaggctctgaaactgctgaaagaaaacctgccggcgtcttaccacgaaggttccaagaacccggttgcgcgtgaacgtgttcacagcgccgcgactatcgccggtatcgcgtttgccaacgccttcctcggtgtatgtcactccatggcgcacaaactgggctctcagttccacattccgcacggtctggcgaacgccctgctgatttgtaacgttatccgctacaacgcgaatgacaacccgaccaagcagaccgctttcagccagtacgatcgtccgcaggcacgccgtcgttacgctgaaattgctgaccacctgggcctgagcgcgccgggcgaccgtaccgctgctaagattgaaaaactgctggcatggctggaaagcattaaagctgagctgggtattcctaagtctatccgtgaagcaggcgtacaggaagctgacttcctggcacacgttgacaaactgtctgaagatgccttcgatgaccagtgcaccggcgctaacccgcgttatccactgatctccgaactgaaacagattctgctggatacctactacggtcgtgatttcaccgaaggtgaagttgcagcgaagaaagacgtcgttgccgcaccgaaagcagagaaaaaagcgaaaaaatccgcttaattcgttatctgttttagcatgacaataacggcctcaattgaggccgtttttttgttttacctgtttatctgatgcctgaaggcgctatgctgatcatctggcctacgtgctcacggcacgcccttcgtcaggaggcctgaataatgacctccaaagcgctacagggcgttttataagccgctctttacctcaggtatcatatgtgccgatgacgctcctgaatcgccgtcagtgagccctcctccagcgcgtccttataatgcttacggcaaactgaaacgtagcgttcattcccgccaataaccacctgttcgccttcgttataaggcctgccgtcctgatcaaggcgcagaaccatactggctttacgaccgcagaaacagatagtttttaattccaccagcttatctgaccatgccagcaagtattggctgccgacaaagagctccccacgaaagtctgttcgtagcccatagcaaagtactggaatatctaatttgtcgacaacctcggataattgataaacctgctggcgagtcaaaaactggctttcgtcgactaacacgcaatgtattgtctgccgcgcgctctcggcacgaatctcttcaaacaaggatgtattttggttaaacaattttgccggcgacgacaaaccgatacgagagctgactttgcctgcgccgaaacgatcgtcgatttccgccgtatatacgacggtacgcatcccgcgttcctgataattgtatgaagattgcagcagtgcagtcgacttacccgcattcattgccgaatagtagaaatatagctgtgccattggtcgcaggacctcacctgagtgaaataaagattggcgggattgtaccataatttaccgacgcgacggcgcggctcgcgctccggtgagtattaagaattgtacaaacatcgctcactatacccaaaataattcgcgttgcttaaaggcggcaagggagtgagtccccaggagcatagataactatgtgactggggtgagcgagcgtagccaacacataagcaacttgaagtatgaagggtatatacacattccttcacaaattatgccgttaaaattcatcaacaatgcttatcatcacccgccaatatgaaaaccttgtacttattgttaccgttactcatacccggtgcaaagtaatagggttttcttgtaaggaaagctaatacaagagattgatatctctgcaatgagatcgtatttcatcatgataaaatgtgacctgactcctaaatttttagcgacagacggtgagtatcccccctgccaataagctcttttttgtgcggtgcctcaaggaaaatttaagttgagataattaaaacgtgtgcttaataaagcgtaattttgaattccttacattcctggctattgcacaactgaatttatcgctctattattagctcaacaaaccaccccaatataagtttgagattactacaatgagcgaagcacttaaaattctgaacaacatccgtactcttcgtgcgcaggcaagagaatgtactctggaaacgcttgaagaaatgctggaaaaattagaagttgtcgttaatgagcgtcgtgaagaagaaagcgctgctgctgctgaagtggaagaacgcactcgtaaactgcaacagtatcgtgaaatgttaattgccgacggcattgacccgaatgaactgctgaatagcatggctgccgctaaatccggtaccaaagctaaacgcgcagctcgtccggctaaatatagctatgttgacgaaaacggtgaaactaaaacctggactggccagggtcgtacaccggctgtaatcaaaaaagcaatggaagaacaaggtaagcaactggaagatttcctgatcaaggaataatttacttcctggatgcttaaaatcccgccgctggcgggattttttttgcctgagttctccgctgacgaccccaggcataaaaaaagcgccggatttaccagcgcttctgttaaaaaatttataacgtatcgttacttcttaatacccatttcttcttcaagccaggctttaaattcagcacccagcgaattatgacggatgccatattcaacgaatgcctgcatatatcctaacttattaccacagtcatggcttttacccttcatgtggtaggcttcaaccgtttctttttcgatcagcatatcgatagcatcggtcaactgaatttcatccccggcgcccggaggggttttcgccagcaacgcccagatatccgcgctcaacacataacgcccgacaatcgcaaggttagacggcgcgacatccgcttttggtttttcaaccacgccaaccatcggcacactttcgcccggcgccagctcaacgcctttacaatcgaccacgccgtatgcagtcacatcttctaccggctcaaccataatctggctattgccggtttcgtcaaaacggcggatcatttcagccaggttatcctgagacaggtcggactcatattcgtcaagaataacgtctggcagaataacagcgacaggttcgtttccgacaacgggatgcgcgcacaatacggcatggcccaggccttttgccagcccttgacgtacctgcataatagtgacatgcggagggcaaatagactgaacctcctccagaagctgacgcttaacgcgtttttccagcatcgcttccagctcaaaactggtatcaaagtggttttcaatagagtttttagacgagtgcgtaacaagcacgatttcagtaatgccagcagcgatacattcgttcacgacgtactgaattaatggcttatcaaccagcggcagcatctctttcgggatagctttggtcgctggcagcatcctggttcccaatcccgcgaccgggataacggcttttttgactttcgaattaagggcagccatttaaaattctcctggactgttcatgtattgaacgtgttcattaatctgtatcgtgttccagtatatcagtaccagaacaagcctcaggtccaaaaaggacttatattggtataattaagacaaatacttataaatctgccgcagatagtaacactcgtcgggaaaggccggtaaagcaatttccgctcactcttccgtttggtcattccgcagacaacatcaatcgcagacgccctcctgcgccccatatttgacactgccacgagtcgcaacgctggcttaattggttaaggtaggcgttacccaatgttcctagcggcacgccgctgctaatttgaacctgatgagcgcccgtatttaaggtggcgttcaatccggcggagacgagaatcaaatttttgagctcactgtgatagtagccgacaaatagcgggaattgcccaggtaaattggcttgtctgagcagatgatttacctgttttaatagcgcgcctaactccggtaaacggtgcttttgttggcctagctgatcctgcaataagccgttaaatagcgcccgcagcaacaatgcggctaacacgccgttatcgcccgcccgggtgacatccaggcaataaaatgccagttcgttatcagatagcggcgcaatatccagcaccagtccaggctgatcggcggagacgagctgccggtaattaatgcggcaatgagaaatcacctgctgtaccgggggctgcaattcctgcaacaattgcgctgcggcggtcggattactcaccattgcatcccagtcacgaaacaggcgttcttcttcttcaacccgcgagttaaacatattagggtataagcaagcgaatacggtttcccgcaagcggttgagatcttttaccggcttcagcaagacatcttcaaccccaaggcgcaacgctttggcgatatccgccatattttctgttgcggaaataaccagaataggcgtctggtctccgcgattacgtaagttttctaccagtttgagaccgttcattctcggcatagcgatatcacatatcatgagatcaggggtaaaacgccccatcaactccagggcatccaccccgtcgcctgccaatgccgttgtcgctcccaaagaggaaaaccacgaatccagaagcgagcgaaatacaggctcgtcttcaacaataagaatctgttttccgaccaatggctgcgtcatgttctctcccctgactggctttaatcaatagtggcatggtattgccgcttgcgcctgtcagaatttgcttaagtgatcgtaaaaggtacattaaacgtcggtacgcaccaagggtataagttcgtccatctttttctctacggctaactgacccgccgcaatagcggcatgggcgcgatgaaaatccagcgtagagatttgcggacagaatggttgaatgagaatatcaggcggatcgccagccatacggttacgtttaagacgattttccaacacctggatggaggttgtcatgatttccattgccccaggcgaactcacgccacggcgtgaagtcaggctactgaaacgttcttttaaacgcttatgccagggcagcgcatcatcgctctcttcattgatattcccgacatttacagagagcaaatcttgctgcatgaggtgggcatcatgttgcaggtctaccgcaataacgatatcagcccccagcgccctggttaacgaaacaggtaccggattaacgactgcgccatctaccagccagtaaccgttatgttcaaccggagacatcagccctggcatactgcacgacgcgcgtacagcaaggtgtagatcgccttcagtaaaccatagctctcgtcccgtgctaagattcgtcgcgaccgcgccaaaacgtcttgaacagtggtcaaaatccgtgacgggcataatatcccgatagtgattaaatacgcgttcgccgcgaagcaaccctcctctgccccaggatacatccatcaggcgtaaaacatcccagtagcggaatgaacatacccactgttcaagcgccgataatttattacaggcatacgcggcgccgaccagtgaacctattgagcatcctgcaacgatatcaatatcaatgcctgcttgcttgagggctttgatgaccccaatatgagaccatcctctcgctgcgccagatcccagcgccagccctattttcatttttctcatcgtacttaacgacttcccctggcttcaagacgtagcaacatcgccactgctcagttaacataatgccaccctggcgttcaacgccgttttttatattcagggagattattgtgtctcagccttgtccctgtggtagcgctgacgagtatagcctatgttgtggtcgtattgtgtccggagaacgagtagcacccgatccgtcacatctcatgcgctctcgttactgcgcttttgtgatgaaagacgcagattacttaattaagagctggcatccaacctgcaatgcggccgcgtttcgtgatgatatcatcgccggatttgccaataccaggtggctcggcctgactatttttgaacatacctggtcagaagcagaaaatacagggtatgttagttttatcgcgcgtttttccgaacaagggaaaaacggggcgattatcgaacgttctcgttttatcaaagaaaacggtcagtggtattatattgacggtacccgcccgcagttgggtcgaaatgatccctgcccgtgcggttcaggcaaaaaatttaaaaagtgctgcggccagtgacgcctgacagtatcgatacagcaaacactctcaacaggatttttccggcaatgcaatcactacaacgtaaagttctgcgtactatttgtcccgatcaaaaaggccttatcgcgcggattaccaacatttgctataagcatgagcttaatattgtgcaaaacaatgaatttgttgaccatcgcaccggacgcttttttatgcggaccgagctggaaggcatcttcaatgattccactcttctggccgatctggacagcgccttaccggaaggctctgttcgtgaactcaatcccgccggacgccgtcgggtagtgattctggttaccaaagaggcgcattgtctgggcgacctgctgatgaaagccaactatggcgggctggatgttgaaatcgccgcggtcattggcaaccatgaaacgttacgctcgctggttgaacgttttgagatccctttcgaactggtcagccatgagggattaacgcgtgaagagcatgacacgaagatggcggacgccattgatgcccatcaaccggactatgtggtgctggccaagtatatgcgtgttttgacgccaggttttgtggcgcgcttcccgaacaaaattatcaatatccaccactcattcctgccggcgtttatcggcgcgcgtccttatcatcaggcctatgagcgcggcgtgaaaatcatcggcgctaccgcgcactatgtgaatgataatctggatgaaggcccaatcattatgcaggacgtgattcatgtcgatcacacttacaccgcagaagatatgatgcgtgccgggcgcgacgttgagaaaaacgtattaagccgcgcgctgtatcaggttctggcacagcgagtctttgtttacggcaatcggacgattattctttaatcgtcagtaatatgaattgattagctttaatccgttacggatgaaaagtacgcaaacagttcatttcaggcaaaggaatgctttacagcggcgtgtcatttgatatgatgcgccccgcttcccaaaaggaagcgggccagtattaagcattaccccgtggtggggttcccgagcggccaaagggagcagactgtaaatctgccgtcatcgacttcgaaggttcgaatccttcccccaccaccattattcactacagcgatgtagttaactcgatgagcaatgcagaagtttgcacttgtcggggaagggtgagaaccttcgattaaggttcgactcgagcgaaagaacgttgccaacggtaacggcccgtagggtgaggagtgaagcgacgaataatccttcctccaccaccatcttcaagctttacctacaatttgaattacccctggtggggttcccgagcggccaaagggagcagactgtaaatctgccgtcatcgacttcgaaggttcgaatccttcccccaccaccatcgcttccgtcgcgtatcttatccccgttaagcatagtgtctcatatctctctgtacgggaaggatgagaagcttctaccagggttcgattcgagcgcagcgagaaagcgttgccgcaggcaacgacccgaagggcgaagcgcgcagcgctgagtcatccttcccccaccaccatcactcccgtcgcgtatcttatccccgttaagcacactgtctcatatctctccgtacgggaaggatgagaagcttcgactaaggttcgattcgagcgcagcgagaacgcgttgccgcaggcaacgacccgaagggcgaagcgcgcagcgctgagtcatccttcccccaccaccatcactcccgtcgcgtatcttatccccgctaagcacagtgccttatatctctctgtacgggaaggatgagaagcttcgactaaggttcgattcgagcgtcagcgagaaagcgttgccgcaggcaacgacccgaagggcgaagcgcgcagcgctgagtcatccttcccccaccaccatcactcccgtcgcgtatcttatccccgttaagcacagtgtctcatatctctctgtacgggaaggatgagaagcttcgaccaaggttcgattcgagcgcagcgagaaagcgttgccgcaggcaacgacccgaagggcgaagcgcgcagcgctgagtcatccttcccccaccaccataatctcccggcagcgcctcaatcaatcttcatcgcccccacaggcagacttcactccatggcgccatggcttattggttatcttatcaatacttcttcctggcaatctttttcgcctcctttgactgatcaatttttcgccagatgagattaaaggcggcatatgtctcgctaagttgatctggggtgagcgttcccttgagtcggtttctttcggcaatgagcgctgaacaatcatccttagatttttccgtatacatacttgccatgtaataccaaatataggcctgcttattatctttaggcacaccctggcgcccatgagcataaatttccccaagcgctgattgtgccggagtaaacccctgctctgccgctttgaggtaccacttcagcgcattccggctattttcaggcacgcctcttcccgtgctatatgctacgccaagctgatattgcgctttcgcaaaatcctgttttgctgcttttcgataccatgcgatagcctgtctgtcgctttgcgcgacgccgcgaccaaatgcagacatgatgcccagatgcgtttgcgcagcaggcagcccctggcgagcggctttgcgataccacgccagcgcctgttggtagtcctgagaaacgccctcaccctgcataaacatcacgccgatcgcatcctgcgcctcggccaatccttgcgctgcggctctgcgataccactccagcgccaggttgtgatctttcaataagtgataaccgttgtaataccatacgccaaaattgtactgtacctttgccatcacgcgttgcgctgtttttcgataccacgtctgagagtgaacccggtcagcgggatgcgctttatcatagagcgcattcagcggaatgtggcctggcgtatagctgcctggtataccttcattaagccagtaaactgcctgacgataatcctgaggcacgccttcaccataaaaataggcaacgccgagataaagttgcgcggggtagtacatattttccgccgctttacgcatcaagatcgccgtttgctgataatcctgaggaacgccctgaccgtgggcgtacattactccaagcttaaattgtgctgacgaagctgaaccctgtccgcggacaacgcccgcatcattggttggagaggcggcttttcgataccactccagcgctagctgggtattttggggaaacccatcgccatacatataggcgtcaccgaggatttcttgcgtactactatcccctagctctgccgccttgcgataccactccagcgctttttgtcgactaagtggaaaattttcaccatagttgtaatgatagccaaggatgaaataggaaaaatcagaaccttgtttacccgctttctccagccattttatggctagtttataatcaggcttaacgtatcgcccctccgcataccagcttccaagcgagaactgcgcgctttcatctccttgttccgctttttgctctaattcctgaacgtactggcattcttctgagtcggcgggatagcgctcctcgcagacagcagcgtgagccatttttgaaataaatatatttaatattattattttgaaaattgatgaaaaacgcatacaactatccttattgtcgtttatggcgtgattatatgctgcatcatcatttttctgcttacaaaaaactcgcacagatgctgaataaacccaaaaacaaagagtacggattcagatgccagacatggcagacccgctgtaaacgaaacaaggcggcggtcgataaggcatttatgccgcactccggcaaacagccataaaaaaactccgccgaagcggagtttagggcatcgagagaaaatcagtgacgtgcacgaacaatctggtatttgcgggtcagatactcgaccggcacgctccagatatgcaccaggcgcgagaatgggaacaacaggaacagcgtcatccccagtaccaggtgcatacggaagataaaggctacaccatccagatgtgcggatgcgccaccgtggaaggtcacaactgactgcgcccacccgaccagcttcatcatttcactcccgtccatatgctgggcggagaacggaatggtcagcaggcccagcgcgcactgaatcaccagcagcgagagaatcaaaatatctgcgccggtagtggtggcgcggacacgtgggctaaacagacgacgcttgagcagtaaaataccgccaaccagcgtcagcacgccgcaggcgccgccggcaatcatcgccatcttctgcttcacgtcgaccggcagaaaagcttcatacatccagtgcggcgttaacatgcccaggaagtgaccggcgaaaatacccagaatcccaatgtggaacaggtttgacgccaggttcattcctttgcgatccagcatctgactggaagccgcccgccaggtgtactggccgtagtcgtaacgtaaccaactaccgatcagaaataccgatccggcaatgtacgggtagatatcaaagaagaacatattcaggaagtgcattagtgctgtcctccggtggtgatattcagatattgcggcgccacggccccggcaaaacgacgctggtgagcggagatttccgactcgccacacccttgatcggcgaagaatttcacctgctcttcttcccagaccgcatccaacgcctgcggggtatcatcacgtgcttcattcgcaattttttcagccactttatcgctgtcgataacggtattcgccagttttaacagcagatcgaacagcaccgcataacggctgtcacgctgttgcaaacgtgcgctgagcagcgccagaatcggcgcgatatcctgtaaaccccctaacgcttcgcttttcggcaattgcgcaaggtattccagatacagcggcagatgatcgggaagttcgcgactgtcgagctgcaaaccgtgctgctcatactgtgccatcaggtcaaccatcgcctgaccgcgatcgcgggattccccgtgtacatgttcaaacagcagcagcgatgtggcgcgaccacggtcaaacagttcgctataagcggcctgtacatccagcaggtcctgcgcggttaaatcgcgcaggaaaacgcccagagtctgggcatcctctttatccaggttctcagatgacgcgagcgcatcgaacaactcctgctgatgctgccacagggcagcatccgggtactcgagcagacgcgaaacaatgacgagttcaatcatgcgtgcggctccgttttgctggtcacatcaacagcgtcgatgcggcggctgttgaacagattgaatttggtatcagacccgtggcaaccatcgccgaaggtaaagccacaaccgcttttctccgggaatgcgtcacgcgccagttcacgatggctgctcggcaccacaaagcgatcttcataattagcaattgccaggtaacgatacatttcctgcgcctgggcttcgcttaaacccacctcttccagcgcgcgggtatccactttaccgtctacggtttccgcacgtttgtagtgacgcatcgccagcatccgtttcagcgccaacagtaccggctgggtgtcgccagcagtcaacaggttcgccaggtactgcaccgggatacgcagactgtctacatccggcagaataccgttgctgccaagttcgcccgcatcggcggcagactgaatcggtgacaaaggcggtacgtaccagaccatcggtagcgtgcggtattccggatgcagcggcagcgccagcttccagtcaatcgccattttgtacactggcgattgctgcgccgcatcgatcacgctctgcggcacgccgtccttcagcgcctgctcaatgacagccggatcgtttggatcgaggaacacgtccagttgacgctggtacagatctttttcgttttccgtactggcggcgctttcaatggcatcggcgtcatacagcagtacgccaagataacggatacgacccacgcaggtttccgagcaaacagtcggctgaccagcttcgatacgcgggtagcagaagatgcacttctcggacttgccgctcttccagttgaagtaaatcttcttgtacgggcagccggtgatgcacatccgccagccgcggcacttgtcctggtcgatcagcacgatgccatcttcttcacgcttgtagatagcaccgctcgggcaggtcgccacgcacgccgggttgagacagtgctcgcacaggcgcggcaggtacatcatgaaggtgttttcgaactggccgtacatcgccttctgcatgttttcaaagttctggtctttagcgcgtttttcgaactcgccgcccagaatctcttcccagtttggcccgctggtaattttgtccatccgctggccggtaatcagcgagcgcggacgcgcgatcggctgatgtttgctttccggcgcggtatgcaggttctggtagtcgtaatcaaacggctcgtagtagtcgtcgatgcccggcagatgcgggttagcgaagattttacccagcagcagcgcccggttgcccatgcgcggctgtagcttgccgttaattttgcggatccagccgcctttccatttttcctgattttcccagtcattcggaaaaccaacgccaggcttactttctacgttgttgaaccaggcgtattccataccttcgcgactggtccagacgtttttacaggtgactgaacaggtatgacagccgatgcacttatcgagattcagcaccatgccgacttgtgaacgaattttcattttacgctctcctgtacctggtcattgccttcgccatccaaccagttaatgttcttcatcttacgtaccaccacaaactcatcgcggttggagccgacggtaccgtagtagttaaagccgtaggctaactgcgcatagccgccgatcatatgggtcggtttcggcgtaatgcgcgtcaccgagttatgaataccgccgcgctgctgggtaatttccgaccccggcaggtttacgatacgttcctgcgcgtggtacatcatggtcatgcccgccggtacacgctggctgaccactgcgcgtgcggtcaatgcgccgttgctgttgaagacttcgatccagtcgttatcttcaatgcccagatctttggcgtcggtttcgctcatccatacaatcgggccgccacgcgacaaggtcagcatcaacagattatcgctgtaggtcgagtggataccccatttctggtgcggcgtcaggaagttgagcgccttctccggattaccgttggatttacgccccatcaccgctttcaccgagcgggtgtcgatcggtgggcgatacaccagcaaactttcgccgaagtcgcgcatccactggtgatcctgatacaactgttggcgaccagacagcgtacgccatgggatcagctcgtgaacgttggtataaccggcgttataagaaacgtgctcatcttccagaccagaccaggtcgggctggagataattttgcgcggctgggcctgaatatcgcggaagcggattttctcttcttctttattggttgccagatgcgtatggtcgcgaccggtaaactcgctcagcgccgcccaggctttcaccgccacctgaccgttggtttccggcgctaacgtcaggatcatctctgccgcgtcaatcgccgtgttgagcatcggctggcctttcgccggaccgtccgctttggtgtaattaagcttacgcagcaagtccatttcgctctgcgtgttccaggcaatccctttcccgccgttgccgattttctccatcagcgggccgatagaggtaaagcgttcgtaagtcgccgggtaatcgcgctcaacggtcatgatgtgcggcgcggttttccctggaatcagatcgcattcgccttttttccagtctttcacgtccagcggctgcgccagttcagcggcagaatcgtgctggatcggcagcgtcacgacgtcagtctctttacccaggtggcctacacagacttcggagaatttcttcgcaatgcctttgtagatttcccagtcgcttttcgattcccaggccggatctacggcggcagacagcggatgaataaacggatgcatatccgaggtattcatatcgtctttttcataccaggtggcggtcggcagtacgatatcggagtacaggcaggtgctcgacaggcggaagtccagcgtcaccaccagatccagtttgccgtccagaccattgtcacgccactccacttcttccggcttcacaccgccctgtttacccagatccagcccctgaataccatgctcagtacccagcagatacttcagcatgtactcatggcctttaccggaagacccaagcaggttagaacgccagatgaacaggttacgcgggtggtttttaccgttttccggctgctcggcggcaaagcgaatcgaaccctctttcagggatttgacggtatagtctaccggcgtcataccggctttttccgcttcacgcgcaatatacagcgggttagtgcctaactgcggcgccgacggcaaccagcccatacgttcggcgcgcacattgaagtcaatcagatggccgctatagcgggatttgtccgccatcggcgacagtaattcctcggcggtcaccgtctcgtagcgccactggctggagtggttatagaagtaagaggtgctattcatgtgacgcgccggacgctgccagtcaagggcaaacgccagcggctgccagccggtctgcggacgcagtttttcctggccgacgtagtgcgcccagccgccgccgctctgaccaacgcaaccacagaacaccaacatattgatcagcccgcgatagttcatatcgaggtgataccagtggttcagaccggcgccaacgataatcattgaacgcccgtgcgttttgtccgcgttatcggcgaactcccgtgcgatacggatgatctgcgcccgcggcacgccggtgatctgctcggcccatgctggcgtatacgctttggtatcatcataactggcggcacaattttcatcgttcaggccgcgttccagaccatagttcgccatggtcaggtcatacacggtggtgactaacgctgaagaaccatcggccagttgcagacgttttgccggcagtttatgcagcaggacgttatccagcgccacatgattaaagtactctgaaccctcgccgccgaaatacgggaagcccacgtcagcaatctcatcctggctgcccagcaagctgagctgcaattcagtttctgcaccggtagtcccgtcgcgctgttcgaggttccatttgcctttttcgccccagcggaaaccaattgaaccgtttggcgctaccatttcaccgttgctgttgatagcgacggttttccattccgggttattttcctgccccagcgaatcaacgagatcggcagcgcgcagcatacgacctgcggcataataaccatcacgctcttcaagcatcaccagcattggcatgtcggtatagcgacggacataatcggtgaagtactggcgcgggttgtcgaggtggaactcgcgcagcatgacgtggcccatcgccagcgccatcgccgcatcggtcccctgcttcggcgccagccacagatcgcacagtttggcgatttcagcatagtccggcgtcaccgcgacggttttagtgcctttgtaacgtacttcggtaaagaagtgggcgtccggcgtacgggtttgcggcacgttagagccccaggcgataatatagctggagttgtaccagtcagcggattccggcacgtcggtctgctcgccccaggtttgcggggaggctggcggcaggtcgcagtaccagtcgtagaagctcaggcaggtaccgccaatcagcgaaagataacgtgcgccggaagcgtaggaaaccatcgacatcgccgggatgggtgagaagcccgcgacgcggtcagggccataggttttcacggtgtacacgttggaggcggcgatcagctcgttcacttcctgccatgaggagcgaacaaagccgccacgaccacgcgcctgtttgaagcttttggctttatcggcatcttcaatgatggaggcccatgcctctaccggatcgcgatgcagttttttcgcctcgcgccacatcttcatcagacgtttgcgcattagcggatatttcagtcggttagcgctgtagagataccaggagtagcttgccccgcgcgggcagccgcgaggttcatggtttggcatgtcaggacgggtgcgcgggtaatcggtttgctgtgtttcccaggtcaccagaccatttttgacataaattttccagctacaagaaccggtgcagttcaccccatgggttgagcgcacaattttgtcatgctgccaacgttggcggtatccgtcctcccagtcccggtttgtttcgagaagctggccgtgcccatcggcaaaggtttcgcccttctgcttgaagtagcgaaaccggtccaggaatttactcatcgggtttctcctgtgtggaaccttacggctctctgataaatcgacattgcttaactaagggcgaaggtaacgcgctgaatgggcgtgagaattgataacgatcaaggcggacagggatgcaaatggcgcgcaaacctcctgcatactcctttgggaggaggagttttatttatatatattactgatttaattacataaaattaaatttacgcacgacatgaatgttaaattttcaacaagtgggtattaaggggtatccccctggatgaccgataaagatgtgcgtggttagccctgccgcgtctctcttcttgattataagtatgttgtaactaaatacagataaaaaaaagcgcggtctaacgccgcgcaaaggataatcaaaagttactttttatttttagaatgacgtccatataccgcccaggtaataacgacgcaggcgatatagaaaataagaaagactttcatcgcgccgactggagaaccggttaatgctaaagatgaaccaaacgctttcggaataaaaaagccgccaatcgcgccaatcgcggaaataaagcccagcgccgccgccgtatcagttgccgcttcacgcatggctctttcttccgacccgccttccgcttttacccggtccattgtcagtttacggaagataacggagatcatctggaaggtagaaccactccccaacccagccgtcaggaacagcgccagaaataccccgtagaacgcgataaagctaccgccaacgccgccagtaggtaatgtcaggaacagcagaccgctgaaaatcgccatcaggacaaagttgataagcgtgacgcgagtcccccccagacggtcagaaattgcgccgcctgccgaacgcgccagcgcgccgataaacggaccgaaaaacgcataatgcaggatctgcacatccgggaattgcgttttagacagcatcgcgaaccccgcggagaaaccgataaacgatccgaaggtcgccagatacagcagactcatgatccacagatgaccacgtttgagcaccggcagttgctcttttagcgaggccttagacgtcgccagttcgttcatgccgaaccacgccgccagcgtaaaaatggccaggaaaggcacccaaatccaggccgcgttcgccagatagagctgagaaccgtccggctgctctacaccgtggctgccaaaggcggcaaagatagagagcgaaaccaccagcggcgcaaccagttgcatcacgctcacgcccatattgcccagaccaccgttcagacccagcgcgccgccctgcttttgtttaggaaagaaaaagctgatgttcgccatactggaggcaaagttcgcgccggcaaaaccacacagcaaggaaataataatgaaggtgctaaatggcgtactggtatcctgaacggcaaagcctaaccatacgcagggcacgatgaggataccggtactgaacgctgtccagcgacgtccgccaaatagcggcaccataaaggagtaaggcacccgtagcagcgcgccggaaacagatggcagcgcagtcaacataaagagctgatcggtcgtaaaattaaatcccactttcggcaggttcaccgccactgcgctgaatagcatccagacgcaaaacgccagcagtaaacacggcacagaaatccacaaattacggctggcgacacgatggccgcgctgctgccagaatgccggatcttccggacgccattccgtgataacagcgccagttgccctttccggggcggataagtgactcatagacacctctgattcttgatttgatgtctgccacattagggtttactgccgaaggtaagttgatataaatcaaaggaaaagtcgtcatcaccggcgactaaaaatagttattacccttaatgagtaggctattttggtaaaaaagctgtggtttttcaccatgctgtgtctgtctactccttcccgtcgcagatacctctctacagcggcaattaaggagtaactcgttataggtatgggtatactccgctgtatcgttgagaatagcggcacagccgattgacgcccctcttttttgctacgttttttcggcgacattaccccgaagaaagaaggtaacatgtttaaacggtgtttctctcctcttacgctggttaaccaactggcgctgattgtcatgctctctaccgctatcggcgtggcggggatggcggtttccggctggctggttcagggtgtgcagggtagcgctcatgcgattaataaagcgggctcattgcgtatgcaaagctatcgactactggcagctgtcccgctggatgctaaagatcaaaagctgctggatgagatggagcaaacggcattcagccctgaactgacccgcgccgctgagcgagacgggcagcagaagcagcttaaagcgttgcaggattactggcataacgaactctcgccagggctacagcacgcgcaaaacgcgcacgcggtcgcagaagatgtcacgcgctttgtggcgggcctggatcgcctggtgacgtcgttcgaccatacgactgaattgcgtatcgaacgcgtggtattagttcaccgggtaatggcgatctttatggcgctattgctggtatttacgattatctggctacgtgttcgccttttgcagccctggaaacagttgttatcaatggcgcgcgccgtcagtcagcgcgactttacccaacgtgccaatatcagtggacgcaatgagatggccgcgttgggttctgcgctcaataatatgtctgaagaactggccgaaagttatgcggtactggaacagcgcgtacaggaaaaaacagccggtctggaacataaaaaccagattctctcgtttttgtggcaagccaaccgccgactgcattcacaggctccgctatgtgagcgtctttcaccggtactgaatggcctgcaaaatttaacccagttgcatgatattgagctgcgggtctatgacctggaagatgaagataatcaccaggaatttacctgtcagtcggacatcagttgcgatgataaaggctgccacctttgcccacgtagcgccctgccgatgattaacggcggcaccaccttaaaatggcggctcaccgactctcacacccaatacggtattttgctggcgacgctgccctatggacgccatctcagccacgatcaacaacagttggtggacacgctggttgaacagcttaccgcgactctggcgctcgacaggcatcaggagcgccagcagcagttgattgtcatggaagagcgtgccaccattgcccgcgaactgcatgattctattgcccagtcgctctcttgtatgaagatgcaggtgagctgcctgcaaatgcagggcgacgtgttaccggaaagcagccgtgagttactcagccaaattcgcaatgagctaaactgctcctgggcgcaactgcgcgaactgttaaccactttccggttacagttgacggaacccgggctacgtccggcgctggaggcaagctgccaggagttcagcgcccggtttggctttacggtaaaactggattatcagcttcccccccgcctggtgccttcacaccaggcgatacacctgttgcaaattgccagggaagccctcagcaacgcccttaaacactctcatgccgacgatgtggtggtgacagtgacgcaatgtggcaaacaggtcaaactaaaagtgcaggataatggctgcggcgtcccggaaaacgccgaacgcagtaatcactacggcatgatcatcatgcgcgatcgggcgcaaagtttgcgcggcgattgccaggtacgccgacgcgagactggcggaacagaggtcactgttacttttattccagaaacaaacttcacagaaacccagggagatacccatgaataatcaggaaccggcaaccatcctgttaatcgatgaccatccgatgctacgcacgggtgtaaagcagcttgtgagtatggcgcccgatatcagcgtggtcggagaagccagcaacggtgagcagggtattgacctggcggaatcgctcgatcccgatctgatcctccttgatttgaatatgccgggaatgaatggtctcgaaacgctggataaattacgcgaaaaagcgctgtcaggacgtattgtcgttttcagcgtatccaaccatgaagaagatgtcgtcacggcgctaaagcgcggcgcggacggttatctgttgaaagacatggagccggaggacttgctcaaagcgttacaacaggccgccgccggcgaaatggtattaagtgaagcgttaacgccggtactggcggccagcctgcgggccaaccgcgccaccaccgatcgcgatgtaacgcaactcaccccgcgtgagcgcgatattctgaagctcatcgcgcagggattgccgaataagatgattgcccggcgtctggatatcaccgaaagtacggtcaaagtgcacgtgaaacatatgctcaagaaaatgaagctgaaatcgcgcgtggaggccgccgtctgggtacatcaggaacgcatcttttaattattgctcctggaacggttgccaatgcggattatcgtccggcatcgtgataaacggttcagtcagcgcgagcgtgatctcattggaagagacacgctgacctttttcatcctcaaccaccaccgataaacgccagcgatttgccgcgccttcgcggtgatcccaggccggcataatgattgtccagccctcggtactgcgggtgtccgttcctgccgtcaaacttaatgcctgtgtatcgccctgccagctcaaatgacgaataccgtgcacgctgcgcacctgcaattttaacgcaaccgtctcaccaggcgtaagatcccagggcggcgtcgccagaaaaaccgttaacgttttacgctgccgatactccattgtcggcagcgagttacgttgcggcgtatcatagcggctaccgcgtaatgactggctttgcgccacttcactggcggcaagctgctttttgagcggcacgccgaagcggtagttaagcgtcagccccaggttattttgactgaccccgctctcgccctgtttgtgctgggcggtcatggtaagcaaaggtactggcgtatagttgagacccagttttaacgcgacaggattgtgataccccgttccggagtcaaacagatccacgctatcgccaaagtactgctccagactaacgctggtattgatatgctggtaaaacggcaggcgcatttgcgcgttgatatcatatccgcgcgccattcgctgttctaaggtcgccgtatgcgtctgccagtcggcaaaaggctgataatagttggcggataaacgcaaatattctccccacgcctccgcgccaaagccggcgcgctgtagattttcatccagcagattatcgtaaaaggtattatagccaagaagccagccatcctgcgcccagcgctgtcctacgccaatgttgcttaccagtccgtcagtctgttgcgtaagaccaagctggctccaggtcagatagcgctgtttatcctgtaaagggataaaccagcttccgcgactgccgttaaaatgaccttcgttatcgacgttaatatccacgctggcgctgccccaggctgatagccagctttcaagctgctggttaacctgctcgctgaccacatcgcgtacctgtccgaaagcgaattgccgcgcctgttcaccagtatccagatcgttatttttcatgctggcttcgccaaacgctttggccatctcggcaaaatgcttttccccttcgtgggattccggcatcatgcctaaatccggcagacggttttgcgtgaaaggatcttgcgcctgcgcacggatcgtaccgctggcagccagcaagagaagcgagagtgagaatgaacgaaaaacaatacggctcaacgtgtcggcaacttctacaacaaaagataagaggaatgacatcagagtaaaccataacgtgtccggacaggttttgcagccttttctcgtgcttccaggaatatccttattttttccgcagagcgtcccgggattttatccacgcatttggcggtacccggttcccgaggtaacataacgccattgccgacaaaatttctcaaggagaagggttatccatgcaaaatatcgtcattatcgctaacggcgccgcctacggcagcgaatcattatttaatagcctgcgtctggccattgcgctgcgcgagcaggaaagccatctcgatttacgcctgtttttgatgtcagatgccgtaaccgcagggttacgcggtcaaaaaccagccgaaggctacaatattcagcaaatgctggaaattctgaccgcgcaaaacgtaccggtaaaattatgcaaaacctgtgcggacggacgtggtatcactcccctgccgctgattgacggtgtggaaatcggaacgctggtcgagctggcgcaatggacgctggcagcggacaaagtgctgacattttgaatctgtacgcgggaaaagctcccgcgtcaggatagacttccggcaagaaaatcaggctaacacgcgagtaataccgcgtttattttttcttatgccatttatcatcctcgcctttttcataatcgtttttaaccgtcgcccaggcgactttgtgtgcggtttcctcgcggctggcgtcatcacgacgatcggctttatctttatattgctcccaggcgctattaaacgcttctttgtaaatgtcctgggcatgggctggaagaacattccgcacattatcgggtaaatcacttttggctttatacggcatcagcgcctccgtcttcagggaaaacattaagtgtggtaaacaatgcgttattacgccagtcgaggaggatttttgctttttacggaaattaactttttgttatttaaacactgttaaaacaagatgcttgttttactgaccttgaaagaaaaaaatcgtctacgccgtaaaactacgtaaaaaaccactaaaaaaatacaaatttctgctatttttaccttctttactctttccaaaatattaacacctgcacaagggagaccctcatgacacatgcctgtgaggcggtgaaaacccgccataaggagacttcgcttattttcccggttcttgcgctggtagtgctgttcctttggggaagcagccagtcactaccagtggttattggcatcaatatccttgcacttattggtattttaagcagcgcatttagcgtggtccgtcatgccgatgtattagcgcatcgactcggcgaaccctatggatcgcttattttaagcctgtccgtcgttattcttgaggtgagtttaatttccgcgctgatggctaccggcgatgctgcgccaacgcttatgcgcgatacgctctactctattattatgattgtcaccgggggactggtcggtttctcgttgttgttgggcgggcgtaaattcgcaacgcaatatatgaatttatttgggattaagcagtatcttatcgcgctgtttccgctagcgattattgtgctggtttttccaatggcattgccgcaagccaatttctctaccggtcaggcattattggtcgcgttaatttccgccgcgatgtacggcgtatttttgttgattcaaaccaaaacgcaccagagcttatttatctatgaacatgaagatgaaggcgatgatgacaatccacaccacggtaaaccctccgcgcacagtagcggctggcatacggtctggttactcattcatttaattgcggtcattgccgttaccaaaatgaatgccagcccgctggaggcgttgctgaccagcatgaacgccccggtcgcctttaccggtttcctggtcgcgctgttaattctctcgccggaaggactgggcgcgctgaaggcggtactgaataatcaggttcagcgggcaatgaatctgttcttcggatcggtgttggcgacgatttcattaaccgtgccggtcgtcacgctcatcgcctgggcgacaggtaatgatctggtgtttggtttaggcgcgccggaaatggtagtgatggtggcctcgttagtgctgtgccatatttcgttctctaccggacgcaccaacgtgctaaacggcgcggcgcatctggctttatttgccgcctatctgatgacgatttttgcctgatataaaaaagccggatagtatcttatccggcctacacaagctaaaaaccgcaatcagttctcggtatccagctcgtcgaagcttttcaccaaatcatcaatcgcttttatctgggtcaggaactgctccagtttcgccagcggcagcgcggaaggaccgtcgcacttcgcgttagccgggtccggatgcgactccaggaacaggcccgccagaccgacagccataccggcgcgcgccagctcggtcacctgaccacgacgaccgccagaggcggcgccaaatgggtcgcggcattgcagcgcgtgggtgacgtcgaaaatcactggcgagttgccggagacctttttcatcacgctaaagcccagcatatccaccaccaggttgtcatagccgaagttcgcgccgcggtcgcacagaatcaccttatcgttaccgccctcatggaacttatccacaatattgcccatctgacccgggcttacgaactgcggctttttcacgttaatcacagcgccggttttcgccatcgcttccaccaggtcggtctggcgcgccagaaacgccgggagctgaatcacgtcaaccacatcagcaacaggctgcgcctggctggcttcatggacgtcagtgatcacttttacgccaaatgtctgcttgagttcctggaagattttcatcccttcttccagacccggcccacggtaagagtgaatagaggaacggttggctttatcaaaagaggccttgaacacgtaaggaatacccagcttctgggtaacggttacgtagtgctcacaaatgcgcattgccagatcgcgtgactccagcacgttcataccgccaaacagcacaaacggcaggtcatttgccaccttaatgtcgccaatgttaaccactttttgtttcataggatcgccttacacttataggtaaaatgtcggttaattaatgtagaacaatttgcttgtgcgcaatggtgttgatctgcgcacgaatcatttcgctgatcgggtcttccggacactgttcaacgaagtagcttaaatcagtcagcgcaacgtgttcacactcaagctgcgcgtagatcaacccgcggtcacggatttcgtaaggatcttccgggttaaattgcaacaatgcttcgctaacgcgcagcgccagctccatttgccgttcctccatcagcgaggatttcagcgtatccagtagcttacgaatcacttcggcgttatccgcttcgtccaaatcttcattaaacaactcggcgaccggactaatattgccttttaaccagacttccagagtatgttcatcaagcgtttcaccgttgaacgggttaatcagccacatttccccttccagcgattcaatacgcaaaatcaactgcgttgggaagataacgggcaccaacggcaaatcaagacggtttgctatccataataaaatagcgcccaacgataccgcgctcccctggcgttttttcaggactttatcgagccataaagcatcagaaagacggtagacgccgcgggaatccgtgaacccccactcgccgtaaaaaagtgccagcaatttttccagttgctcatcctgagacaggagctggctaatttcttcctgcgccagactgaccagacgttccagttcgtcgtagacaaactgcgtgggaaaatccaggcgaatcatctctgatgccaggatcatgccatcacacagcggcgcattgttaaattcgaaatcagctaacgacctcatgacttaccccagtaacggtatttttgtggtggcgagtttaatgatgatgtacagcaccaccagcgccagcgggaaagcgataaaacgcgcctgctggctgcgcgcctgacgataatcaagcgcaataaaacccaaaacgatgtagatgataacgccaaacagtttttcagtcagccatgagcccgactccgtgaatggcaggatgtgcgttttaacgattaacccaataccgctaagcagtaacagggtatctatgacgggaggcacgattcgtgtccagcgcgcggcggccaacgcatggccgcaatagcgccaccagtaacgagcgacaaacaaactgacggagagcgcaacacagataagatgaagcgtgagcaacattgcaattgtcatggcgtaaaacgtccgcaggtcacgcgttcattaccaccataatcacgacacgtttctacatccgagtaaccagaccgcctgaaaaccgctcttaccgcttcgccctgctgccaaccgtgttccagcagcaggaagccgccgggcgttaacatctggcgggcgttatcgataatatgcgtaagatccgccataccgttttcgtccgccaccaacgctgagcgcggttcaaagcgtacatcgccttcgctaaggtgcgggtcctgcgcgtcaatgtagggcggattgctgacaatcatgtcgaactgctgccccgatagcgcgctgaaccaacaactttgcagtatacgcacattccggatagccaaatgttccgcgttgcgtatcgccagcgcaaccgcatcaggcatacgatcgaccgcagtcacctcgcaatccggtcgctcgcaggccagcgccagcgcaatcgcgccggttccggtgcctaaatccagaatacgacaggtttttaccggcaatcgcgccaacgcctgttccaccagacattcggtatccgggcgcgggattagcgtggcgggagaaacgaagagcggcagcgaccagaattcgcgtaagcccgtcaggtacgcaataggttcgccctgtttacgccgctgcagcaggtccgcgagctgttgttgctggacgtcggtaagcggcgtttcgccaaaggccatgatatacgtccgccccttgcccgtaacgtactctagcaggatctcggcgtcgcgccgggggctgtcgctgtcccggagctggtttaccgcctcatgcagccagtgctgaaaatccattattcctgctcggataaggcggctaacaggtcagcctggtgttcctgaacaatcggctcaatcagcatatccagcttaccttccatcgtttcatcaaggcgatataacgtcagattaatacgatgatcggtcacgcgcccctgcgggaaattataggtccggttacgatcgctgcgatcgccgctgccaagcagattgcgtcgcgttgacgcctcggcctgctggcgttttgccgtttcggcggcgtgaatgcgcgccccgagcaccgagagcgctttcgctttgtttttatgctgcgaacgctcgtcctggcattccaccacgatgccggtcggcaagtgggtaatacggatagcggagtcggtggtgttaacgtgctgaccgcccgcgccggaagaacgaaacgtatcaatgcgcagatccgccgggttaatatccggcagctcggcttccggcagctccggcatcacggcgacggtacaggcggaggtatggatacgcccctgcgactcggtcgccggaacacgctgtacgcggtgtccgccggactcaaatttcagtcggccatacacgccgtcgccgctgattttggcgatgatctctttataaccgccatgctcgccttcgctcatgctcatgatctccacgcgccagcggcgcgcttcggcataacgactgtacatgcggaacagatcgccggcaaacagcgcggcttcgtcgccgccggtaccggcgcgaacctcaaggaacgcgtttcgttcatcgtccggatctttcggcagcagcagtacctgtaactgttgctccagttgttcgcttttttctttcgcttcgcgcagttcttcctgcgccatttctcgcatttcaggatcgtcgagcatcatctgagccgtctcgatatcgtcctgaacctgttgccagtccgtaaaacagcgagaaacgtcgcttaattgcgcatattcgcgcgacaatgcgcgaaagcggtcctggtcggcgataattcccgcatcgcccagcaacgcctgaacttcctcatggcgttcgtgcagggcttccagtttggcaacgatagaaggcttcataggcgtaaattcaccctgtaaaaaagtgtggtgtgtgctgctactccagcccgaggctgtcgcgcagaatattcaggcgttcgtcatccccgtcacgggcagcctgttgaagtgatttcgttggcgcatgaatcaggcggttggtcagtttccatgccagatcctgcaagatggcttgcgcatcaccgccctgttgaagggccgacagcgctttggtagtcagttcgtcacgaatctgctccgactgactacggtattcccgaatggtctcgctggccccctgggcgcgtagccaggccataaactcgctggcttcctgctcaacaatcgtttccgcttctactgccgcagcctgacgctgcgccagattatgcgaaatgatgctctgtaaatcatcgacgctataaagataagcgttcgccagtttgccgacttccggttcaacgtcgcgcggtacggcaatatccaccagcagcatcggctggttgcgacggctttttaatgcgcgctccaccatgcctttaccgataatcggcagcgggctggcggtcgaactgataataatatcggcatcctgcaaacgggcgtcgatatcgctgagcgagataacctcagcgcctacctcatccgccagggcttgcgcgcgctcgcgggttcggttggcgataatcatcttttgtactttatgctcgcgcaggtgacgcgccaccagttcaatggtttcgcccgcgccaactaacagtacggtgaccgtcgagagcgattcaaagatttggcgggcgagcgtacaggcggcaaacgcgacggagacggcgctagcgccgatatcggtttcagtccgcactcgcttagcgacggaaaaagacttctgaaacattcgctccagcgcgctggcgttaaggtggcctttttgcgaatccgcaaacgcttttttcacctgaccgaggatttgcggttcgcccagcaccagtgaatccagaccgctggcgacgcgcatcaggtggctgacggcgtcattgtcctgatgccagtacagactgttgcgcagatcgtcctcgttcaggttatggtaatcgcataaccagcggatcagcgcttcttgcaggttatcctgctcttccacgctcagatacagctctgtacggttacaggttgacagcacgaccccgccctgcaccattggctgcgcaagcaggctgtccagcgcctgatcaagcgtgtccggcgaaaacgttacgcgttctcgcagcgatacaggtgccgttttatggttaataccgagcgctaaaagggtcatgtctgcgggagtagtaccagcgttgatatggttagtctgcttgcatcatacaggatgcgcgtggtcaataaaagagagagcccccttttggagtaattggcagcgctcgctaatttgatgatttaagacaacttgaaagtagacgatgtcaccaggcggcgctagcattaaaggctataactgtaaccgatagcaaaaatttgccgaatcgcggcgcgaacgtttttacagcctgcaggttcagttttcaggcctgataagcgtaacgccatcaggcaattattgcaccgtatcacaaggattcgtcatcactatgaccctgcccgattttcgcctgattcgtctactgccgttagcaagcctggttctcaccgcctgtacgcttcctgggcataaaggcccgggcaagagcccggattcccctcagtggcgccagcatcagcaagaggtgcgtcatctgaatcaataccagacgcgcggcgcctttgcttacatctcagatgatcagaaagtctatgcgcgtttcttctggcaacagaccggacaggatcgctatcgcctgctgctcaccaatccgctgggcagcaccgagctggagcttaacgcccagccgggcaacgttcagttggtggataacaaaggccagcgttataccgccgatgacgccgaagagatgatcggcaaactcaccgggatgccgattccgttaaacagcctgcggcagtggatcctcggtctgcctggcgatgccaccgactacaaactggacgaccagtatcgcctgagcgaagtgaactatcgccaggatggtaaaaactggaaagtggtttacggtggctatgacagcaaaacgcagcctgccatgcctgccaatatggagctttcagacggcagtcagcgcattaagctgaaaatggataactggattgtgaaatgatgacccattggccttctccggcaaaattaaatctgtttttatatatcaccggacagcgagcagacggctaccacacgctgcagacgctgtttcagtttctggattatggcgacacactccacatcgaaccgcgtcacgatggcgaaatccatttattaacgccggttaacggcgttgaaaatgaagacaatctgatcgtccgtgccgcgcggctgttgatgaaagtcgcctcggagagtgggcgcctgcccgccggaagcggtgcggatatcagcattgagaagcgccttcccatgggcggcggtctgggcggcggctcatctaacgccgcgaccgttctggtggcgctcaatcatctttggcaatgcgggctttccattgatgaactggcgacgctcggcctgacgctcggcgccgacgtcccggtctttgttcgtggccacgccgcgtttgccgaaggcgtaggcgaaatattaacgccggtgaatccgccggaaaaatggtatctggtcgcgcaccctggcgtaagcattcccacaccggttatctttaaagatcctcaattgccgcgtaatacgccaaaaaggtcaatagatacgttactaaaatgtgaattcagcaatgattgcgaggttatcgcaagaaaacgttttcgcgaggttgatgcggcgctttcctggctgttagaatacgcgccgtcgcgcctgactgggacaggggcctgtgtctttgctgaattcgatacagagtcttgtgctcgccaggtgcttgagcaagccccggaatggctcaatgcttttgtggcgaagggtgtcaacctctccccattgcatcgagagttactctaacgcattcgggtttcaggaagatggcgaaatgacgagtcgccggtcatatatgccgtatttgaccggtgtgaggcatcgataccagcgcacatgaaacgtgaatgaagacgagtaagccgggcaagctgagcttcggtgacaacgtcaccttgttccagacgttgcatcgcgctctttaatacaccgcctggataggattttgcctggcccgcacagttttcggcagattctttccaccaatggacgcatgcctgaggttcttctcgtgcctgatatgaagctttttgctggtaacgctaccccggaactagcacaacgtattgccaaccgcctgtacacttctctcggcgacgccgccgtaggtcgctttagcgacggcgaagtcagcgtacaaatcaacgaaaatgtacgcggtggtgatattttcatcatccagtccacttgtgccccaaccaacgacaacctgatggaattggtcgttatggttgatgccctgcgtcgtgcttccgcaggtcgtatcaccgccgttatcccctactttggctatgcacgtcaggaccgtcgcgtacgttccgcccgtgtgccgattaccgcaaaagttgtcgctgacttcctgtccagcgtcggcgttgaccgcgttctcaccgtagatctgcatgctgaacagatccagggcttctttgacgttccggttgataacgtgttcggtagcccaatcctgctcgaagatatgctgcaactgaatctggataacccgatcgtggtttccccggatattggcggcgtggttcgtgcccgcgctatcgctaagctgctgaacgataccgatatggctatcattgataaacgtcgtccgcgcgcgaacgtttctcaggtgatgcacatcatcggcgacgtcgctggccgtgactgcgtgctggttgatgatatgatcgataccggcggtactctgtgcaaagcagcagaagcattgaaagaacgtggcgctaaacgcgtgtttgcctacgcgacgcacccgatcttctcaggcaatgcggcaaacaacctgcgcaactccgtcattgatgaagtcgttgtctgcgacaccattccgctgaccgacgaaatcaaagcgctgccgaacgtgcgtaccttgaccctgtcaggtatgctggccgaagcgattcgccgtatcagcaacgaagaatcgatttccgccatgttcgagcattgatcgaacccggatctgaaacccgctgcggcgggtttttttgtctgtaacacccttttgtatgacttatgcctccttcacctgccatttagttgacagatgatgcgctcatggatgaaacattattgtgaacaaattattttcctcacatgtgatgcctttccgcgctctcatcgatgcttgctggaaagaaaaatataccgcctcccggttcacccgtgatgtgatagccgggatcaccgtcgggattattgctatcccgctggcgatggcgctggcaattggcagtggcgttgcgccgcagtatggcctctatacctccgctgtcgccgggatcgtgatcgcgctaaccggcggctcgcgctttagcgtttccggccctaccgccgcgtttgtggtgattttgtatccggtatcgcaacagtttggtctggcgggcctactggtcgccacgctgatgtcgggcttcttcctgatccttttcggcctggcgagactggggcgattgattgaatatatcccggtgtcggtcacgttgggttttacctcagggattggtattaccatcggtaccatgcagattaaagattttcttggtctgcagatggcccatgtgccagagcactatttgcagaaagtcggcgcgctgtttatggcgttgcccaccgtcaatattggcgatgccgccattggcgtggtaacgctgggaacgttgattttctggccgcgtctcggtattcgtctgccaggacatcttcccgcgctgctggctggttgcgccgtgatggggatcgttaatctgctgggcggcaatgtggcgactatcggctcacagttccattatgttctggctgacggcactcagggcaacggcatcccgcagctcctgccgcaactgatgctgccgtggagtcttcctggctccgatttcacgctaagctgggattcactgcgcgcgctgctgccagcggccttctcgatggcaatgctgggggcaatcgaatcattgctctgcgccgtcgtgctggacggcatgaccggcaccaaacataaagctaacagcgaacttatcggccaggggctggggaatatggtcgcgccgttctttggcggcatcaccgccaccgccgcgattgcccgctctgccgccaacgtccgcgctggcgcgacctctcccatctcggcggtaattcacgctatcctggtcattctggcgctactggtcttggccccgctactctcctggctgccgctttccgcgatggcggcgctactgctgatggtggcatggaatatgagtgaagcccataaagtggtggatctgttacgccatgcgccgaaagacgacattatcgttatgctgctgtgcatgtcattaacggttctgtttgatatggtcatcgccatcagcgtggggattgtccttgcttccctgctgtttatgcgccgtattgcgcgtatgactagacttgcgccggtcaatgtcgatgtgcctgatgatgtgctggtgctgcgtgttatcggtccgctctttttcgccgcggcggaagggctgtttaccgaccttgagtcacgtattaagggcaaacgtatcgtcgttctgaaatgggacgcagtaccagtgctggatgcaggcgggcttgatgcttttcagcgttttgtgaagcgtctgccggaaggttgcgaattgcgtatcagtaacctggagttccaaccgctgcgcacaatggcgcgtgccggtatcaaacctattcctgggcgtctgaccttcttcccgaacaggacggaggcgttagcggatttactcagttaatggacaatgcccggtggcgataacgcttaccgggcctgaaccggttagctatgacgacgattgtcgttacggcggcaacgtttgtcatagtgacgtacccaccaatatttgtcgctcacctgctcatgcccccctacacgagcccccgccagccaaagaactgcaccgacaaaaatgctcagtattgcgccatgcgcaaaaaattgcggcaaattaaactgcggcagttggtttaaaatagagtaacccacgccgacaaccatcacgaccagccccaaccccatcagcacgttaccgaataacgaagcgtttttgcgtttcatatgtcacctccggaacttttgggttgtttttaggaaatccccctaaactttatgtgtaaagtatagacaacactttcgtttgtaagtgcgggtgcgatcacaaatgtaaagtttcatttaacaaaactttacaaataacacactgaacagtttacatttttaataatcaatgctggcaattatttaatttacttcagagtgtcgctgtgttttgtcaagcgggcagacagacagtaaactacgcgccagttatggatctactcaggacaaaaaacgtggcaattaaattgattgttggtctggcgaatcccggtgcggaatatgccgcgacgcgacacaatgcaggcgcatggtacgtcgatttactggcggagcgcctgcgcgcgccgttgcgtgaagagcctaaattctttggctatacctcacgcatcacgctggaaggggaagatgttcgcctgctggtacccaccacgttcatgaacctcagtggtaaagcagttggcgcaatggccagtttttaccgtattcagccggacgaaattttggtcgctcacgacgagctggatctccctccgggcgtcgcgaaatttaaacttggcggcggccacggcggccacaatggtctgaaagacatcatcagcaagctgggcaataatcccaactttcaccgattacgcgttggaattggtcatccaggcgataaaaataaagttgttggtttcgtgctgggtaaaccccctgtttctgaacaaaaattaattgatgaggccattgacgaagcggcacgctgtacggaattgtggttcaaagagggtctggccaaagcaacaagccgtttgcatacctttaaggcgcaataaccagtgatgtgcggcatttttgccgcacgccgtgtataataggcgaagttatttccatttctgcaatctgttttctataacaggttgattattaagatattaaggtgagttaaatcatgggattcaaatgcggtatcgtcggtctgcccaacgtcgggaaatccaccctgttcaacgcgctgacaaaagccggtattgaagcggcaaactttccgttctgcactatcgaaccgaataccggtgtcgtgccgatgcccgatccgcgtctggaccagttggctgagattgttaaaccgcaacgcattctaccaaccacgatggagttcgtggatatcgccggtctggtaaaaggcgcgtccaaaggcgaagggttgggtaaccagttcctgaccaatatccgtgaaactgaagctatcggtcacgtggttcgctgctttgagaacgacaatatcatccatgtggcgggtaaagtaaacccggtagaagatattgatgttatcaataccgaactggcgctggctgacctcgatacctgcgagcgcgctatccatcgcgtacagaagaaagccaaaggcggcgataaagacgccaaagcggaactggccgcgctggaaaaatgcctgccgcacctggccgaagcggggatgctgcgttcgctggacctgacggacgaagataaagcggctatccgttatttaagcttcctgacgctgaagccgacaatgtatatcgctaacgtcaatgaagacggttttgaaaataacccgtatctggaccaggttcgcgaaatcgccgccaaagaaggttcggtcgtggttccggtgtgtgccgccgtcgaagctgatattgctgagctggatgatgacgagcgcgacgaatttatggctgaactgggtctggaagagccggggctgaaccgcgttattcgcgctggttatcgcctgctgaacctccagacctacttcaccgccggggtgaaagaggttcgcgcatggactattccggttggcgcaaccgcgccgcaggcagcaggtaaaatccataccgacttcgaaaaaggctttatccgcgcccaaactatcgcttttgacgactttattacctataaaggtgaacaaggcgcgaaagaagccggtaagatgcgagcggaaggcaaagattatatcgttaaagatggcgatataatgaacttcctgttcaacgtctaaataaaatttgttgtctcgtgaggttttgctgaatctcataagaggcaaagaaagtcataaaatccacgcagccgcgtggattttttatttcataatatctcaactcatactgacaggctcaattaacgcagagctaacagggtaagttcttttcttaattaccagtcgacattcactgtatggttataaaaaggatgctgatcctttagcggcgtctcataacttgggatcgcatcataatcatcttttccccgaacggaataccttcccgcttcgatatcaaaacgatgtttgagccatcccgcaacatgacttgcgaaagcctcttttcttcttaatggccaatcgacagaagccaaattaacatctaataagtaccgcccttctttattaaccttgatcattccagcctgcagtaacgcccgtaccacctgggattggttatcatgaatccagacccaggcatttccaaattccattgcataactatcatttaaaaaatctttttttgaatataattcacttacataatcattgatagagtcagcataattttttactttagatgcagataaatcaaaaaaagattcaaattcgaaagtattgtcattaatacaggacagtaacgcacccggttccgagagctgggtccatgattgtaaactctctacagctataatgaatttgaaagtatttcttccaatgacaccccggtcaattaaagttaaaatatcgtgagctacggtagggatatcttctgcaaacgggacgattatccccgcaccacttatttcgcttgatctaaaatcaaatcctggggtactttcaatgttttccggaataccatactctttaatatgattaaggaaattattaatatcgccacgatatggccatcgccattcacgttcatgtgtccagtcaatcttacctggaacataagtaacatatctatattgttcaatcaaaggaagagccgtttcatcaagaatacgttccccgtttctgccttgcgagcatcgagcattgttatgctgatccaacccatatatgactggccttgccccataattaaacatttgctctttaggtaaaacgattgcatataaaccgattttttcatttcgttctaatcggcgaacaccagtctctaaataagctgcaatcggcatatctgtaaagcataccaccggggagtcaccatatacggttcgttgcccatttcggtatgaccaggacgagaaaattttatgactgcgtaaagataatcgaagtaaatatttagcatcaatgaaacatgcgtggtgctgattattaaaaccacagtgctcaggcaaataaatatggctaccggtctctaaattaacgtcccgaaaaaaatgaatcaaataatcggataagtcaaatctgatgttatttttcatgggacgccctctttcaaacagtctcttttttgcattcctttaaaaccagcatcactattttatataaaaatcatcacgaagtatgcttcttttaacgatgacctcaaatcctccccccttttgcatcaacttacgcatccctgaaatggcgagaacaggctaaatctacccgaggtcactcgctaaaaacctcatcctggaacaagctcaaccgcccttccccgctacggccctttcgccgaaaaaccgataatgggtataaatataccgctataagctatacccacacacttcacattgtttcttatcgttaatccgatacgcttttttcacattatttctggcggtatacgccggtgcaaagtgaatcgggctcgtttccgcgctcgcgcgtaacacaatgatttaccttgctggcggaacgtcaacggacccgcaaaagcgccttatgcccctggcggagcgtggtgcaaaaaggagaaaaaatacgcgttatgaataacgaggagaccttttatcaagccatgcgtcgtaagggagtgacccgacgcagctttctcaaattctgtagccttgccgccacatcgctgggactgggcgccggaatgacgccaaagatcgcctgggcgctggagaataaaccgcgaattccggtggtctggattcatggactggaatgcacctgctgtaccgaatcctttatccgttcctcgcacccgctagccaaagatgtgatcctctcgctgatttcccttgattatgacgacaccctgatggccgccgccggcgcacaggccgaagaagtctttgacgatattaccactcgctacgccgggaaatacattctggcggtggaaggcaatccgccgttaggagagcaaggaatgttctgtatcagcggcggccgcccgtttattgaaaaactgaagaaagccgccgcgggcgccagcgctattatcgcctggggaaactgcgcctcctggggttgcgtccaggccgcccgccccaatccgacccaggcaacgcctatcgataaagtgatcaccgacaagccgatcgtgaaagtccctggatgtccgccaatcccggatgtcatgagcgccattatcacctatatggtgacgtttgatcgtctgccggaactcgatcgcatgggccgtccactgatgttctatggtcagcgtatccacgataaatgctaccgccgcgcccattttgacgccggtgaatttgtcgagagctgggatgatgacgccgcccgcaagggatactgcctgtacaagatgggctgtaaagggccaaccacctataacgcctgctcctccacacgctggaatgacggcgtctcctttcctatccagtccggtcacggatgtctgggatgctcagaaaatggtttctgggatcgcggctcgttttatagccgcgtggtggatattccccagatgggtacccattcaaccgccgatacggtggggctgaccgcgctgggcgtggtcgcggcgggcgttggcggtcacgctgtcgccagcgcgctcaaccaacgtaaacgccacaaacaacagttagcgcaagccgaacaacagccggacaatgaggataaacaggcatgagtaaccagtatcaaacccagggttataccgttaacgacgccggccgtcgtctgatcgtggacccgattacccgcatcgaagggcatatgcgctgcgaagtgaacattgatgagcaaaacgtcattaccaatgccgtttcctgcggcacaatgttccgcgggctggagatcattctgcaaggccgtgacccgcgtgacgcctgggcgtttgttgaacgtatttgtggtgtatgtaccggggtacatgctctggcatcggtgtacgctatcgaagatgcgattggtatccaggtgccggataacgccaatattatacgtaacatcatgctggctacgttgtggtgtcacgatcatctggtccatttttatcagttagccggtatggactggattgatgttctgaatgcgctgaaagccgatccgcgcgccacctcgcagttggcgcaaagcctttccgcctggccgatgtcatcgccgggctacttctttgacgtacaaaatcgattaaagaaatttgtcgatggcggtcagcttgggatattccgtaacggctattggggacatccacagtacaaattgtcgccagaggctaatctgatgggctttgcccactatcttgaagccctcgacttccagcgcgagatcgtcaaaatccataccatatttggcggtaagaacccccatcctaactggatcgttggcgggatgccgtgcgcgatcaatctcgatcaaagcggcgcggtcggggctatcaatatggagcgcctcaacctggtgcagtcgatcatcacccgcaccgccgactttattaacaacgtgatggttccggacgcgctggctatcggccagttcaataaagcatggagtcaaattggcaccggtctgtcggataaatgcgtgctgagctacggcgcatttccggacattgccaacgacttcagccagcaaagcctgttaatgccgggcggcgcggtgatcaatggcgattttaaaaatgttatgccggtagatttggccgatccgcagcagatacaggagtttgtggatcacgcctggtaccgctatccggacgatcggctgggccgtcatccttttgacggcattaccgatccctggtacaacccgggtgatgtcaaaggcagcgatacgcatatccagcagctcaacgagcaggaacgctactcctggattaaagcgccgcgctggcggggtcatgccatggaagtcggcccgcttgcccgaacgcttatcgcgtatcacaaaggggatgccgccaccatagagtcggtagatcgcatgatgtctgcccttaaactgccgctctccggtatccagtctacgcttggccgtattttatgccgcgcgcacgaagcgcaatgggccgtcggtaagctgcagtattttttcgacaggcttatgaccaacctgaaaaacggcgacctggccaccgccaataccgagaaatgggaaccggccagttggccgcagcactgccgcggcatcggttttaccgaagcgcctcgtggagcgttgggacactgggcgtcaatccgcgatcagaagattgaactctatcagtgcgtggtccccaccacctggaacgccagcccgcgcgatcctaaaaaacagatcggcgcctatgaagcggcattgatgggaacgcaaatggcgattcccgaccaaccgttagaaatcctgaggacgctgcacagcttcgacccctgcctcgcctgttcaacccacgtgctcggcgacgacggcagcgaactgattgccgtccaggtacgctaagcgttaaggaaaagaacgatgactggaaagctatctccacgcgtcggggaggcgcgtgatactgccgtcagccactatgtgtttgaagcgccggtacgcctgtggcactggctaacggtggcctgcatgttggtactgatggtaacaggctacttcattggccggcccttgccgtcggtgagtggcgaggcgacctatctgttttacatgggctatatccggctgatccactttgccgccgcgatgatctttaccgtgttactgctggggcgaatttattgggcctgtgtcggcaaccgctattcacgagagctgtttattgtcccggtctggcgtcgtagttggtggcaaggcgctttcaccgtggtccgctggtatctgtttctggagaaaaaaccggggagcgacatcggacataaccctgtcgcgcaggccgcgatgttcggctatttcctgttgtcggtatttatgatcctcaccggtttcgctctgtttggcgagcatagccagtacgccatctttgcgccgttccgctatgtggttgaatttttctactggaccggcggcaactccatcgatattcacagttggcaccgactgggcatgtggctgatcgccgccttcatcgtcgggcacgtttacctcgctatccgggaagacattatgtccgacgatacggtgatctccaccatgatcaatggctatcgcagccataaattccccaaaccgcacgacaaggagccctcatgaatgcgcaacgcgtagtggtgatggggttaggaaacctgctgtgggccgatgaaggattcggtatccgggtcgcggagcgtttgtatgcccgatatcactggcctgaagaggtagaaattgtggacggcggtacgcaagggctaaacctgttaggttatgttgagcaagccagccatctcctgctccttgacgcgatcgattacggcctggcgccgggcagcctgcgaacctatgccggcgagaaaatccccgcgtatctcagcgccaaaaaaatgagcctgcatcaaaacagtttttccgaagttctggcgctggccgacatccgcgggcatctgccctgtcacattgcgctggtcggcctgcaaccggcgctactggacgactacggcggtagcctgagcgaaatagctcgcagccagctaccggcggcagaacaggccgccctggcgcaactggccgcctgggggatcgtgccgcaggcaaatgaggtcgcacgctgcctgaactataaatgcctgtcgatggaaaattatgagggagtgcgcatacgtcagtatcagacacgtctggagggcaaaagaagtggcgaatgacaccccgttctctgcgctatggcaacgcctgttaacccgtggatggcaaccggtagaggcttctacggtagacgactggatcaaacgggttggagatggcgtcatcctgttaagtagcgatccgcggcgtacgccggaagtcagcgataacccggtgatgattgccgaactcctgcgtgagttcccgcagtttgactggcaggtggcggtggccgaccttgaacaaagcgaagctatcggcgatcgctttaatgtacgtcggtttccggcgacgttggtttttacagacggcaagctacgcggcgcgctcagcggcattcatccctgggctgaactgctcacgctgatgcgttcgatagttgacactcccgcagcgcaggagacagtacaatgagcaacgccttttttcatctgctggggccaggtacgcagcctgatgacgccagtttctcgatgaatcccttaccgctcacctgtcaggtcaatggcgacccaagtatggcggcgctggagcgctgcgctcacagcccggcggtgatggcattgttgaccgatctgcgaggtcagcttgcccggcgcatcccggaagtcggcgacgtgctgggatgggagttatctcccctgaatgccgatgatctctcattcctcaatacgctattgggcgaaggcgaagtctcggtacgcattcagcatccggacgggagtgaaagcgagatccaggagaccatcttctgcggcctgtggcgggtacgccatctgcataaccgacgtctgctgacggatcgtctggaagcgggtagcgcgcccctgacattatggcaagcggcgactgccgatacgctgcctgacgactctctgctgcctccgcctgtcgctggcctgatgaatggactgccgctggcccatgaattattggcgcacgtacgcgatccggcgttgcaaccacacagcatcaatttgacccaactgccgctcagcgaggccgatcgtctttttctggcgcgtttatgcggacacgggaacatccagattcgcatctccgggtatggcgaaagccaaatcaacgccacagcattgcgccatctctggcatgtgcgctgtctggacgcccttaaagggccgttgctcgatagctatgagatttgtcctttgccggagctggtactggcggccccggaagatctggccgattcgcgccagcgcctggatgaagtctgccgatggctggagacgcgctagcgctctcaacaggaacgtcaccggagtccggtactgattagctttttactctctttctgcctacaggagttagcatgtgggatgtcattgacttatcgcgctggcagtttgcgctgaccgcgctgtatcactttttatttgttcctcttacgcttgggctgatttttttgctggccgtcatggagacgatctatgtggtgacggggaaaaccgtctaccgcgatatgacgcgtttctggggcaagctcttcgggatcaattttgctctcggtgtggctaccggcctgaccatggagtttcagttcgggactaactggtcgctctattccaactatgtgggcgatatcttcggcgcgccgctggcgatggaagcgttactggccttttttctcgaatccacttttgtcggtctgttctttttcggctggcagcggctgaataaataccaacacctgctggtcacctggctggtggccttcggctccaatatttcagcattatggattctgaatgccaatggctggatgcagtatcctaccggcgctcatttcaacatcgatacgttacggatggaaatgagcagcttcagcgatctggtctttaacccggtgagccaggtgaaattcgtccataccgtcatgtccggttatgtcaccggcgccatgtttattatgtccatcagcgcctggtatctgctacgtggccgcgagcgtgaggtggccttgcgctcgtttgctatcggctcagtattcggcaccctggccattctgggaaccctgcaactgggggacagttcggcctacgaagtcgcccaaattcagccggtgaaactggcggcgatggaaggcgaatggcaaaccgaacccgcgcccgcgccgtttcatctgattgcctggccgcagcaggaacaggagcgtaatgcatttgccgtgaagatccctgctctgctgggtattctggccacccattcgctggatacaccggttccggggttaaaaaacctgatggacgacgctctgccgcgcctgaagcgtggccgggaggcctggttactcatgaaggagatagcgcaaggcaatcgctcgccgcaggtactgaatgcgtttcaggccgttgagggcgatctggggtacggcattctgctggcgaaatatgccccggatatgaaccatgtgacgccggagcagtatcgtgcggcccagcgtggcgctattcctcaggtggcgccggtgttctggagtttccgtattatggtcggctgcggttcgctgctgttagtggtgatgttgattgcgttgatacagacgctgcgaatgcgtatcgaccagcatcgctgggtattgcgtatgacgctgtggagcctgccgttaccgtggattgccattgaagccggttggtttatgacggagtttggccgtcagccctgggcgattcaggacattctgccgacctggtacgctcactccgcgctgacgccgggccagctggccttctcaatgggacttatcctcggactttacaccctgtttttaatcgcggaagtctatctgatgcagaagtacgcgcgtcttgggccgagcgccatgcaacatcaacaacaagcgcaacaacagggataaaggagacaatcatgttggattatgaaacgttgcggttcatttggtggctgctgatcggcgtcatcctggtggcatttatggtaactgacgggtttgatatgggtgtcggttgcctgctcccgctgatagcgcgcaacgatgacgaacgccgggtattgatcaatagcgtgggcgcccactgggaaggaaaccaggtatggttgattctcgcgggcggggcattattcgccgcctggccacgggtctatgccgccgcgttttccggtttttatgtggcgatgatcctggtgctgtgtgccctcttctttcgcccgctggcctttgattatcggggaaaaatcgccaatgcccgctggcgcgcgctgtgggataccggtctggttatcggcagcctggttcccccagtcgtattcggcatcgcgttcggcaacctgtttttaggcgtgccgtttgccttcacgccgcagcttcatgttgactattttggcaccttctggcagttactctcgccctttgccctactgtgtggattattgagtctgtcgttggtgattatgcaaggaggcgtctggttacagttgaaaacggagggcgttattcgtcaacgggctctgtcggccacccgctacagcgcgctgctgatcgtgatctgcttcctgctggccggttactggctgtgggccggcgttgatggctttgtcttgctcacgcaggatgccaacggcccttccaatccgctcttaaaaggcgtggcgatactccctggcgcatggatgaaccactttatacgctcgccgctactgctcatcatcccgttgctcggtatgatcctgccgattctggctttctatgcctgccttcgcggtcagactattcgtggatttctgttcgcttccctgacccaggcctgcgtcatctttaccgccggcataacgctatttccttttgtgatgccgtcgagtgttagtcctctctccagcctgacggtgtgggacagcacctccagccagatgacgctcgaaatcatgctggtgattgtgctgatttttctgccgatcgtactgctctatacgctatggagctattacaaaatgttggggcgtatcaacctggggaccctccgccgcaacgatcatgaactttattagggagcgggagcgatgtggtatttactgtggtttgtcggcattctgctgatgtgctcactgtcgacactggcgctggtatggcttgagtcgcgtcaacaataaagaggtaaaccggggtcagcgccgtctgactccggttatttttatctttttacgcgcctggtgaagacgtttccccgccgacaggacgacataacattgatacatgtcgttatcataacgtttacttttagaggtgcgtcataattatgacaaatagccaccttgcacatatttcgcatatttaagcaattaattgcataattagcaatatatcacctcttatagcggatagttaaccacttcccatccaaaatcataacgaaaatccaactgcctgccatttttgatctgagttaattgtttaaaaaagtgttaaatttatcgctacatggtgtgatctactatgtaccacggtcaattaaagaacatattacttttatcactaaggtttatcatggataagttatcttacgcttcagatagcagcacatctgcctggaatacctacctgcaacaaatcgagcgtgtggccccttatctgggcgagttatccccctgggtggatactctgcgccacccaaaacgcgctctgatcgtcgatattccggtacaaatggatgatggcactattcgtcatttcgaaggatatcgcgtgcagcacaacctctcccgaggtccgggtaaaggcggtgttcgctaccatcctgacgttgatctcaatgaagtgatggccctgtcagcatggatgaccatcaaatgtgccgcgctgaacctgccatacggcggcgctaaaggcggtatccgcgtcgatccgttctcgctgtcggaaggtgaactggagcgtttgacccgccgctataccagcgagatcggcattatcatcgggccgcagaaagatattcctgcgccggatgtcggcaccaacggtaaagtgatggcctggatgatggatacgtattccatgaatcatggcacgacggtcactggcgtcgtcaccggtaagcctatccatcttggcggttcgctgggccgtgaaaaagcgacggggcgcggcgttttcgtcagcgggctggaagccgcacgtcgggcgaatattgctgttgaaggcgctcgcgttgcggttcagggttttggtaacgtcggcagcgaagccgcgcgtctgtttgcaggcgctggcgcccgtgtcgtggcgattcaggatcataccgcgaccctgtttaacgccaccggtattgacatgaaggcgctcacggcatggcagacagaacacaaacagatagccggtttcccgggcgcggaaactatcgccagcgatgcgttctggcgtctggagatggatattctgatcccggcggcgcttgaaggtcagataactcgtcagcgcgcggaagccctgacgtgtaagctggtgctggaaggggctaacggcccaacctatccggatgctgatgatgttctggccagccgtggtatccttgtggtgcctgacgtggtctgtaacgcaggcggcgtaaccgtcagctacttcgaatgggtacaagatatggccagcttcttctggagcgaagaagagatcaatgcgcgcatggacaaaatcatgaccgacgcgattgtccatgtctgggagaaagcggctgagaaatcctgctctctgcgcaccgcagcctatattgtcgcctgtgagcgcattctgctggcccgtaaagatcgcggtatctatccaggttaaggcgacaaatcattgcgctaaaatccacgtcccggcgtggattttttgtctgtataccccgttttccacgcgcgcgccgataaattctgtctcaataaaatgtctgtttgttcgcaaaatagcggttcaatcacgcgtatctggtcatcgtagactaaggttttgtcatggtaaatgccgttggctttggctcaccgctaaggagataacttgatgatacccccagagattcgccgttctgttctactgcagaaagccataaaactggcgctggcagggacgctgctgacgtttgcatcgttttcggcgactgccgcagacccgtcttccgacactgaaactccgcagccgccggatattttgcttggcccgctctttaatgatgtccagaatgcaaaactcttccccgatcagaaaacctttgctgacgccatacctaatagcgatccgctcatgattcttgcggattatcgtatgcagcggaaccagtccggcttcgatttacgtcattttgttgatgttaacttcaccctgccgaaagcgggtgaaaaatatgtcccgcctgccgggcagtcattgcgtgaacatattgatggcctgtggccggtgctgacacgttcaactaaaaacgtcgaaaagtgggactcgctcttgccgttgcctgaatcctatgtcgtgccgggtggtcgattcagagagatttactactgggacagctactttacgatgctggggctggcggaaagcgggcactgggataaggtggcggatatggtggcgaactttggttacgaaattgacgcctgggggcatattcctaacggcaaccgtacctactacctgagtcgttcgcagccgcctttctttgcgtttatggttgagttactggcgcaacatgaaggtgacgatgcgctgaaagaatacctgccgcaactgcaaaaagagtacgcctactggatggagggcgttgagacattgcagccagggcaacaaaaccaacgcgtcgtcaaactggaagacggcagcgttctcaaccgctactgggacgatcgggatacgccccgccctgaatcctgggttgaagatatcgctaccgccaaaagcaaccccaaccgcccggcaacggagatctatcgagacctccgttctgctgccgcctccggctgggatttcagctcccgctggatggataatccgcagcagctcagtaccattcgtaccaccactattgcccctgtcgatcttaacgctctgctgtatcaactggagaaaaccctcgcccgcgccagcgctgcggcgggcgatcgggccaaagcctcgcactatgacgcgctggccaacgcgcggcaaaaagccattgaaatgcatctgtggaataacaaagagggttggtatgccgactacgatctgaagaacaataaaatccgtgaccaactcaccgctgccgcgctgttcccgctctatgtaaacgccgccgcgaaagatcgcgccgcgaaagtggcggcggcggcccaggcgcatctgctacagcctggcgggctggctaccacctcggttaaaagcggacagcaatgggatgcgccaaacggctgggcgccgttacaatgggtcgctgccgaaggattgcaaaattatgggcaggatgacgtggcaatggaagtcacctggcgctttttaaccaatgtgcagcacacctacgatcgcgagaaaaaactggtcgaaaaatatgatgtcagcagcaccggaaccggcggtggcggcggcgaatatccacttcaggacggctttggctggaccaacggcgtgacgctgaaaatgctcgatctgatttgtccgcaggaaaaaccgtgcgatagcgtaccgtctactcgtccggcatcgttaagcgcaacgccgacaaaaacgccgtctgcagcgacgcagtaacgcgtgtttatagtaggttgacccggtgctgaccgggtcaacgcttacacgttctgcagcggttagccgcgtcgcagaaggcggaaaatcaccagcaccacgatcgcgcccaccacggcgaccaggaaactgtgcagattaaagccgctgatactgccgccaataccaaacatcgtcgccagccatccgccaacgaccgccccgacgataccgagaatacaggtcaggataaatcccccgccatcgcgccccggcataagcaatttggcgataacgccggcaatcaaaccaaaaacaatccaggcgataattcccatttgcgaaccctctttccagtaaaaacgttttaagtataggcaaagtcgagcgtcgcatttctgaacactgatttatctcgcggacataaaaatttatttatcgctattaagttctttctaccgatgccgataacccaacgatagtctgcgtatcaggggttatttcgtgtgagtggttacaatgagcagttcctgaaaaaaaatccattagcgatattaggcgtgctacgggatttaaataaaaatcaggttccactgcgtatttcatgggcgcatggtcaattcatcagtaaaattttggcggtagacccggaaaaactcatcgtggattacggcagccaggaatacgaaaatagcgccgtattacgtgccgggcaggtagccattatcgcagaaacgcagggcgcaaaagtcgagttcacgttgccgcaactcgttacaggcgaatatcagcggctgccggcctttatcacgcccctgccgtcgtcactgtggtttgtccagcgccgggagtattttcgcattggcgcgccgctgtatccgccttattacggcgtcaccacgctaccggacacccgtacgttacgttttcgcctgtttgatctttccctgggcggcatgggcgcgctactggaatccgccatccccgacggactaatcgaaggcgcacgcttttcgcaggttgaactgaacatggggcaatgggggatttttcacgttgacgcccagcttatctccatcagcgagcgtaaggtgattgatgggaaaaatgaaacgatcaccactccccgcctgagctttcgtttccttaacgttagcccggcggtggagcgggagttgcagcggattattttttcgcttgagcgcgaggcccgagaaagagcgaataaagtgcgagaataatcttcacgctaaactacatggcgtccagcgcctgctgaagcttccagatatagcgcggcgcctgcggcgcgggatgattatcaacaacatgttcaaaaaactcgtccgcatccagatcgttaattttttctatcgccttcttcctgtcggatgaaaaagtacgcaataacgcgcctgcgccgttagcataagagacgaccagcgcatattgcatcacctgcggatctttgatgccggccagcggcccattttccagaatgctcagatacgccgcgcccattgagatgttacgctcagggtttttcagctcgctggtggtcggttcgccacgccagcccatacgacggtaaacgtcgcgcccggaggtcgacgcctttaactgcatcaggccaatcgcattagatttactgaccgcgttagggttgccgccggattcaatggcgataatcgcggtgattaaatgcggatcaaccccccatgccgccccggctttttcactgatgggcatccactgcatcgcacgctttacaggcacttcggcattccacggcggattcctgtaatcctgttttgagctacagccagccagtattactaccaaaaaagcaaaccatcttaatttcacgtcatctatccttatagccgtaacttatctgccgaagaggtcataccgccccggccaggcacttaggttgcctccctggtgcgcatccagaaacgtcgcacaacgagggacatcgcctaatatatgcggcatgatatacatttgcattctattgtcagcaaggaattaccatgtctctgtttcatttaatcgccccgtcgggctactgtattaaccaacaggccgcgttacgcggcgttcagcgcctgactgacgcgggtcatcaggtggagaatgacgaggtgattcgtcgccgctttcagcgttttgccggtacggacgcggaacggctggccgatgttaattcgctggcctcgctaacgtcgccggatacaatcgtcatgccggttcgcggcggctatggcgccagccgcttgttggatcgtatcgactggcaggcgctcgcctcccggcaacagcgcgatcccttactgatttgcggtcatagcgattttacggcgattcaggctggactcctggcgcaggccaatgtcatcacctttagcggtcctatgctggcggcaaattttggcgccgaaacgctgaatacgttcaccgagcaacatttctggctggcgctacgcaaggcgcaatttaccgtagagtggcaaggcgacggccctcagtgcgacgcacagggcaccttatggggcggaaatctggcgatgttgatttcccttatcggtacgccctggatgccgactatcgataaaggaattttagtgctggaagatgtcaatgagcatcctttccgggtggagcgtatgcttttgcaactggagtacgccggaattttaaaccgccagagcgccatcgttctcggcagctttagcggcgcggcgcccaacgagtatgacgccggttattctctggagagcgtctacgcgtttttacgttcccgtctgtccgttccgctgattaccggtctcgacttcgggcatgaacaacgtacggtaacgctccctatcggggcaaacgcgatgcttaaaaatacgcgccaggggactcaactcactttatctggccatcctacgctgcaattgtaaaaaaagtccccgacaggctaagtaaaacgctgccctggccgttattatgttaatgttaaataatacaaagtcgtgtgagtcaggagatataaaacgttggatgctgcaacaattattagtctatttattttaggttccatccttgtaaccagcagtatcctgttaagttcattctcatcgcgactgggtatcccgattctggtcattttcctcgccatcgggatgttagcgggtgtggatggcattggcggtattcctttcgataattatcctttcgcttatatggtcagtaacctggcgctggcgattattttactcgatggcggaatgcgcacccaggccagctctttccgggtagcgctgggccccgcgctgtcgctggcgacgctcggcgtactgatcacgtcggggttaacaggtatgatggccgcctggctgtttcatctggatcttatcgaaggtctgcttatcggcgcgatagtcggttccactgacgccgcagcggtcttttctctgcttggcggcaaagggctaaacgaacgtgtaggctccacgctggagatcgaatcgggaagtaacgacccgatggccgtttttctgaccattacattaattgagatgatccagaagcatgaaaccggcctggactggatgtttgccgtccatattatccaacagttcggtctcggtattgtttttggcctgggcggcggttacctgctacagcagatgatcaaccgtatttctctgcccagcggcctgtatccgatgctggcgctcagcggcggtattctgatttttgctttgacgaccgcgcttgaaggcagcggcattctcgcggtctatctgtgcggattcctgttaggaaaccgcccgattcgcaaccgttacggcatcctgcaaaactttgacggactagcctggctggcgcagatcgcgatgttcctggttctggggctgctggtgacgccttccgatctgtggccgattgccgtccctgcgcttattctctccatctggatgattttcttcgcccgcccactgtcggtgtttaccggcctgctgccatttcgcggcttcaatcttcgggagcgcattttcatcagttgggtcggactgcgcggtgcggtgccgattattctcgccgttttcccgatgatggccgggcttgaaaacgctcgcctgttctttaatgtcgctttctttgtggtactggtgtcgctgctcctgcagggaacatcgctgtcatgggcggcgaagagagccaaagtggtcgtgcctccggttggctggccagtatcgcgcgtggggcttgacatccatcctgataatccgtgggagcaattcatttatcagttgagcgccgacaaatggtgcgtcggcgcggcgttgcgcgacctgcatatgccgaacgaaacccgcattgccgcgctatttcgcaataatgaactgtttcaccccacgggtagcactcgcctgcaggaaggcgacgtactctgcgtgattggccgggagcgcgatctgccagcgctgggcaaattgtttagccagtcgccgccggtttcgttagatcagcgtttctttggcgattttatcctcgaagcgaatgcgaaattcgccgacgtggcgcttatctacggtctggaagaaggaacggaataccgggataaacaacaaactctgggtgaaatcatacagcagctgctgggcgctgcgccggtcgtcggcgatcaggtggagtttggcggcatgatttggacggtagctgaaaaagaagataacgtggtacgcaagattggggtacgcgtcgccgaagacgaagcagaataaggtcgcctggcaacgtcgacccgcccccaagtggaccggtcgacgccttagcctgaattaggttacgttgtcacaaacggcacacgcggcgctacggcgcacagtagctcatagcccagcgtgcctgccgcagaagcgacatcatcgaccttaatttctttgccccataattcaaccggcgtgccgattcccgcctgcggacacggcgtcaaatccaccgccagcatatccattgaaacggtgcctactgttctggtacggataccgtccaccagcacaggcgtcccggtcggcgcatggcgtggatagccatcggcataacccgccgcgacgatgccaatgcgttgttcctgagtcacagaataccctccgccatagcctaccctttcacccgcgctcagcgtctgcacgccaataatttcgctactcagcgtcatcacaggttttagtccggtatcggcaatatcccgccactgtcctgacggcgacgcgccgtacaaaataatgcccggcctgacccagtcataatgcgcctggggatgccacagcgtcgctgccgaatttgataacgagtatgcacactgaagaccttccgtcgccagcgcaatacgcctcatcgcctccccgataccttccggatgatcggcctgagcaaaatgtgacatcagggtcatttcaccgacattgcgcattgcccgcaattgctgccagacggtctgcgcccgctcaggctgaaaaccgagtcggttcatgccgctgttgactttgacatagatatccagcggcgcgttaagccgcgcattttgcagcgctttcaactgccagttactgtggatgcaggtggtcagccgataagtgtcatacgcctccaggtcttgcgcatggaaaaacccctccagcatcaatatcggccctttccacccgcgctcacgcagggtaatcgcctcttcaaggttgagcatagcgaaaccatctgtggcgcccagcgcgctccagacgcgttcaataccgtggccgtaggcgttggctttcactaccgaccagacgcgcgcctctggggccgcccggcgcacaatagccaaattttgtttcattacctgtaaatcaaggctggcctgtatagggcgggtcatttcacttcctttatcagttatgcgcgctatgcaaacgttgcgggggggtgggcgtaaaatcggaacggtatcgcgccacgctcagatcgtcgtagggtatcgctggcgtgcgacccgacaagatatcgcttaacaactggcctgaaccgcaggccatcgtccagcctaaggtgccgtgtccagtattaagccacagatttttataacgggtgcgtcctactaccggcgtgccgtccggcgtcatggggcgcaggccggtccagaatgtggcctgctcaatatgaccgccgcgcggaaagagatcgcgcacaaccatctccagcgtctcgcggcgcggttgcagtaagtcggtattaaagcccacgatttccgccattccccccacgcgaatacgcttatcaaaacgcgtaatagcgattttgtaggtttcatcaagaatcgtcgatactggcgcgccgtctggctcgacgattgggatggttaatgaatagcctttcagcggatacaccgggatatcaacaatgcctttaagcatcgccgtcgaatacgatccaaacgccataacatacgcatctgctttaatgatctcatcggcgcatttcacgccgtaaatctgatcattttcgtacagtaatttttccacgggagtattaaagcgaaaggttacgcccgcctgctccgccatgcgcgccagacgctgggtaaagagctgacagtccccggtttcatcattcggtaagcgcagtccgccggttaatttatgcgcaacctcagccagagcgggttcaacttccgccagtcggctggattccaggagctgatacggcaccccggcatcttccagcacggcgatatcacgggtggcgttctcatactgttgcgcggtgcggaagagttgtagcgttcccccctggcggccttcatattcgataccggtcgcggcgcgtagcgttttcagacagtcgcgactatattccgccaggcgcaccatgcggcctttattttccatataatgccgggtatcgcagttacgcagcatttgccacatccacttcagttgaaatggagtgccatccagacgcaccgccagcggcgcatggcgctggaacatccattttatcgccttcagcggtacgccaggggccgcccagggcgccgcatatcccggtgaaatttgtccggcattcgccgcgctggtttcttgcgccgggccggattcgcgatcgatgacggtgacatcatgccccgcctgactcaagtaccaggcgctggtcacgccaactacgccactccccaggatgacaactcgcatagccactccgttaatagtaaaagaacaatcttctgattacatcttgataacccagatgaaaatattattcaacatatgacttttttatggtgacgtgcttcacatataccctaaagacaagcgatcccactggtttgggatctcctgctacgcggcatggctatacagcataaaatgatgccaatacccgattttttgccgttcaatgtggaggaaaccgcaaagaaaagttttcacgatcaagtcgttttttaacatggtgttctatgcttgaaaggaggcgctccatacagagagcgtcgccaacaatgagggtgcgcgaatggcaatgattgattccatgaacaaggacaccacacgtttgagcgatggacccgactggacatttgagctgctggatgtctatctggcagagatagaccgcgtggcgaagctctaccaactggatacttacccgcaccaaattgaagtcatcacttccgaacagatgatggacgcctactccagcgtcgggatgccgatcaactatccgcactggtcgtttggcaaaaagttcattgagacggaacgtctgtataagcatggtcaacaaggactggcttatgaaattgtgatcaactctaatccctgcattgcctacctgatggaagagaacaccatcaccatgcaagcgctggtcatggcgcacgcctgttacggccacaactccttttttaaaaataattatctcttccggagctggacggatgccagctctatcgtcgattacctgattttcgcccgaaattacattacccgctgtgaagaacgctacggagtggatgaagtagaaaaactgctcgactcctgccacgcgctgatgaattacggcgtcgatcgctataagcgcccgcagaaaatctcgttgcaggaagagaaagcgcgacaaaaaagccgggaagagtatctacaaagccaggtgaatatgctgtggcgcacgctgccaaaacgcgaagaagaaaaaacggtcgccgaagcacgccgctttcccgctgaaccgcaggaaaacctgctctattttatggagaaaaacgccccgttgctcgagccgtggcagcgcgaaattctgcgcatcgtgcgtaaagtcagccagtatttttatccgcagaaacagacgcaggtcatgaacgagggctgggcgaccttctggcactacaccatcctgaaccatctgtatgatgaaggcaaagtgacggaacgctttatgctggagtttttacacagccataccaatgtcgtatttcagccgccctataatagcccctggtatagcggaattaacccctatgcgctcggctttgccatgttccaggatatcaaacgtatttgtcagtcccccacggatgaagataaatactggtttccggatattgccggttccgactggctggaaacgctgcacttcgccatgcgcgattttaaagatgaaagctttatcagccagttcctgtcgccaaaagtgatgcgtgatttccgtttcttcacggtacttgatgatgacaggcataattatctggagatctccgccattcataacgaagaaggttatcgggagattcgatcaaaactgtcgtcacagtataacctgagcaatctggagccgaatattcaggtctggaatgtggatttacgcggcgacagatcgctgacgttgcgttatatcccgcataaccgcgcaccgctggataaaggccgcaaagaggtgctgaaacatgtgcatcggttatggggctttgatgtgatgctggagcaacaaaatgaggatggcagcgtagaactgctggagcgttgtccgccgcgcatgaacatgctgtaatcgagatgctgcccggtagtgtttgcgcttaccgggcatcgcgggattatcgtccctgaatcgctaaatcgccgggcagatttttctgcatccgatgccaaatctcgccgctgtcatgcccgtaacgtcgcaccgtttcatacacctggtcgtgcgcgccctgctcgcataacgacgataatttatgatagaaacccagtgccagactgcgcgcttccggattggcgaaatagtggcgaccaatgcgggtgtataaccctttcatgccgttcaggatcaagccgtaaataggattgccggaggcgaatgccagaccacgaaagatgttatagtccagatcggcgaatgcatcggcatggtcggccacttcgtgggcagtggccagtacttcctgcgccttatccgggtgttgacgcaacgcggtacgaataaagatagtagaaatattggtacgcaccgacaacaaattgtcgatcagttgcggaacgctttcatgatcaaggcgggccagcgtttcaaggatattcagccctgacgtttcccaaaaattattaacctttgtcggtttgccatgctgaatggtcagccagccatctcgcgccagccgctgtaacacctcgcgtaatgtcgtgcgcgtcacgccgatcagttcggagagttctcgttctgccggtaagatcgtgccaggaggaaagcggttattccagatactttcaataatatactcttccgcgaaacccgccgggctctgcgccttaatgaccatagtgagatttccattacacagcaaaacatagttgcactcatcataccagacgggcgtaacacctgatagcggacgcaatgaagaaaaaggggatcaaggcaccatttctgatatcgcctgccaatatcgttaaggacttgcttgcattcgtcgcgctcgctactctctgtgtttaaacataaaaacgctatttcatttttctaggtaaggaaaaatttcatggagatctcatggggtcgcgccatgtggcgcaactttttaggccagtcgcccgactggtacaaactggcactacttgtctttttaattgttaacccattcattttcttagctaatccctttattgccggttggctgctggtggcagagtttatcttcactctggcgatggcgttaaagtgttaccccctgctgcccggcgggttactggccattgaagccgttatcatcggtatgaccagcgccgcccatgtacgtgaagaggttgccgccaacctggaagtcttgctgctgctgatgtttatggtggcaggcatctactttatgaagcagttattgctgtttatttttacccgtctgttactcagtatccgctcgaagatggttctgtcgctggccttttgcgtcgccgccgcattcttgtcggctttccttgacgcgcttaccgtcgttgcggtggtgatcagcgtcgccgtcggtttttacgggatttaccatcgtgtggcctcatcgcgcggcgaagagaacgatatgctggacgacagccatatcgatccgcattacaaaacggtgctggagcaattccgcggattcttgcgtagcctgatgatgcatgcaggcgtggggacggcgctgggcggcgtcatgaccatggtcggggagccgcaaaacctgatcatcgctaaagcggctggctggcatttcggcgacttctttttgcggatgtcgcctgtcaccgtcccggtactggtatgtggactgttaacctgtatgctggtcgagaaaatgcgctggtttggctatggcgaaacgttgcccgaaaaagtccgcgacgttttacagcaattcgacgatcaaagccgtaagaagcgcacccgccaggataaaattaaactcatagtccaggcgattattggcgtctggctggttaccgccctcgccctccatctcgcggaggtgggactgattggtctgtcggtcattattctggccaccgcgttaacgggtgtaaccgatgaacacgccatcggcaaagcgtttaccgagtcgctgccgtttactgcgctgttaaccgttttcttctccattgtggcggttattatcgatcaacatcttttcgcgccgattattcagttcgtcttgcaagcctctgaacacgcgcagctaacgctgttctatctctttaacggcctgttgtcttccatctcagataacgtctttgtcggcaccatttatatcaacgaagcgaaggcggcaatggaaaacggcgctatcagcttaaaacagtttgagcttttagccgtggccatcaataccggtactaacctgccatcggtagcgacgccaaatggtcaggcggcattcttattcctgctgacctccgcgctggcgccgttaatccgtctctcctatggccgtatggtctggatggcgttaccgtacactatcgtactgaccctgatagggctactgtgcgtcgaattcactcttgcgccggccaccgaatggatgactcaggcaggatggttagcaacgctttcgtaacgtttggccgggcaatacaccgcccggctccgatttttgcctgataattatccaattacacattatttcatttcccgctagtggcgcacgaattgaattggtttacactgcggtctctacgcatgttgcagggaaattattatgttgcgatttttaaaccagtgctcacggggtcggggcgcatggttactgatggcgtttaccgccctggcgctggaaatggtggcgctgtggttccagcacgtcatgttacttaaaccttgcgtgctatgtatttatgaacgttgcgccctgtttggcgtgatgggcgcgggtctggtcggcgcaatagcgccgaaaacgccgctgcgatacgtggcaatggttatctggatttacagcgcctggcggggtctacaactggcgtatgaacatacgatgattcagttgcatccctcgccgttcatgacctgtgactttatggcgcgctttccagactggttgccgttgggtaaatggctgccacaggtgtttgtggcatccggtgattgcgccgaacgccagtggtcgtttttaacgctggagatgccgcaatggctgttggggatctttgccgcttaccttgtggtggcgatagccgtcgtcatagcccaggcatttaagcctaaaaaacgcgacctgttcggtcgttgatacacacgctccttcgggagcgttttttttgcccgaagcgttgtttgccagtgattaaaaggtgtatattaaatacatcttttaatcaccacatcagggagatgtcttatgtcccacttacgcatcccggcaaactggaaagttaaacgctctaccccctttttcaccaaagagaatgttccggcggcactgctctctcatcacaacacagcggcaggcgttttcggacaactctgcgtgatggaaggcaccgtgacctactatggctttgcgaatgaaaccgcgacagaacccgaagtgaaagtggtgattaatgccgggcaattcgccaccagtccgccgcaatactggcatcgggtagagctgagcgatgatgcgcggttcaacattcatttttgggtagaggaagaccatcagggcgaggaaatgtatcaacagaaaaaagcctgacatcggtaaaccagtcaccactgggcggcgtcccgcccagtagccaggtgattaatggcgctaattaaacgctagagtagtttaattttaacgtggtatccctcaagccctttcatcgtttctcgcggcgcgaactctatttcggaaacctcttgcccggttttcttccgtagttcggcaacctttttgctaatgagtgccgcgatttcctcttctgctttatgtgtcaactcttcgctgttcattgatttcctcctttgaactcgcaaacggctaagcgcaataagacagtgtcgtcatggacgcgctactattttaacgtacaaaaaattataggctatctttctgaggattatcaggatgtttcgctttagaagatgtaaaaaaccgcctggcacagacggtgcatcaggcggttggttaatagcacaagacgctatctacgaggatcttcaacctcattctgggtatccgggtcgagaggatcgtctccctctggtgtatccggaatattttcaccaggaagcggctcatcctctggtaatggatcgactaaatcaggacgttcagacataaagcctccaacgaaccatagttattaaagataccctacagcactacttttggtttttctttggattttttccttcgtcttcgggtgtcttatcaggcttcctgggctgatcctttgaaacgcgcaacggttggttattcatggggtaactcctcaggataggcagcgatatactgctttgaaagtatagagtcgccgccatacgtgcgcgagcgcagcgacaaggcgcgtcagggaagaagagaaggcagtgataacgccaggtgacggaatttgcacgcaattcctggcttcaggggccgcccagcgtaaattaaagaattgtaaacaatcagccgttttgccgaagacttattctgcccacgacggtttatttaaaatatgatcctgccagtcccgtacttcagattctttaaccgcgatatgacggacagaaattcgctcgccatgcatagcagctttcgatccagtcagcagcggatgccacgtcggcaagggcttaccttccgccaacaaacggtaggcgcaggtcatcggcaaccattcaaagtctggcaagttttcgcgagtgagtttgatacagtcgggttcaaattcaaaacggcgctcataatgacggcactggcacgttttgatatttaattgcctgcacgccacgttggtgaagtagatttcatctgtatcttcatccatcagcttatgcaggcagcattgaccgcagccatcgcacagcgactcccactcggcatcggtcatttcatccagggttttacgttgccagaaaggtgtatcgctcattaaagtatccgccattgcactaaagctgcaccttataaccagtctggcctgcagatgcaagttttaccgccgctgaaggcggcaagcagattttacagaacgcgggtagacaacgtttcgccattaaaacgaatgtccagctcatcgccgcttaataatggccccacgcctgccggcgtgccggttagcaccacgtccccggctttgagcgtaaaatagcggctcatataggcgataaggggcacaataggatgaatcatatccgcggtcgacccttgctggcgaacctcgccattaacgttaagtccgataaccgtattttgcggatcgccgcagaaggccgcgacagggatgaagcctgaaatcggacatgcgttatcaaaacctttggctttttcccagggctgtccggcctttttcattttcccttgaatatcgcgcagggttaaatcaagcgccacgccataaccggctatcgctttacgtacatgatcttcggtcgcctggcggagcgttgcgccaatcagcacagcaagctcaacttcatgatgaacagcccccatatccgccggaatcgccagcggctggcgaatatcacacaatgcggtttccggcttgataaaaagcacgggttcttccggcgtcgcgctgcccatctccttgatgtgatttgcgtaattactgcccacgcagaccactttacttaccgggtaatcaagcaaggcgccttgccagttacgatgttgatacatattttcccctaagatcatgatggaattcaggcgcggcgccgaataccgtttaacggtcagcgggcgacgtattttgtcctaccgaagaaagatgttgtttcagcaaatcttccggcggcggcggcaattgtaaataatagccctgctcgcttaacgcctgttttactttttcgagctcggcattgactaattttttacgtccatcaagcggcagcatcatcgctaactgcggctgaccgaatcctttcatcaacgcttcaggcacccgcgaaaaatcgtcttttttttcgacatacaaataggtttgatcgcgcttgctacttctatagatcacacaaaacatacttttactctgaattaacgggatggtgacttgcctcaatataatactgactataacatgccttctggacttcggaatatcactccgtatcggagatgataaatagcaaattgagtaaggccaggatgtcaaacacgccaatcgagcttaaaggcagtagcttcaccttatcagtggttcatttgcatgaagcggaaccagaggttattcgtcaggcgttagaagacaaaatagcgcaggctcctgcgtttttaaaacacgcccctgtcgttattaacgttagcggtcttgaaagcccggtaaactggccggaactgcataagatcgtgacctcaaccggcttacgcattatcggcgtgagcggctgtaaagacgccagcctgaaagtagaaatcgatcggatgggtcttcctttactgactgaaggtaaagagaaagcggttcggcctgcgcccgttgagccggcaacgcccagcgaaccgccgcaaaacgctaatcccatcacaaaaacgcgattaattgatgttccggttcgttccggtcagcgcatttatgctccacaatgtgatctgattgttacaagtcacgtcagcgctggcgcagagcttatcgctgacggcaatatccatgtctatggcatgatgagaggtcgcgcgctggcaggagcgagcggcgatcgggaagcgcaaattttttgtacccatctgacggcagaactggtctctatcgcaggtgtttactggctgagtgataaaatcccggcagaattttatggcaaagcggcgcgcctgcgtttagcagacaacgctttgacagttcaaccgttgaattgatccctttttaacaaggaatttttatggcacgcattattgttgttacttcgggtaaagggggcgttggcaagaccacctccagcgcggccatcgctacaggtttggcccagaagggaaagaaaactgtcgtcattgattttgatatcggactgcgtaacctcgatctgattatggggtgcgaacgtcgtgtcgtttacgattttgtaaacgtcattcagggcgatgcgacactgaatcaggcgctgatcaaagataagcgtactgaaaatctcttcattcttccggcgtcgcagacccgggataaagacgcgctaacgcgcgaaggcgtcgctaaggtactggactcactgaaagcgatggactttgagttcatcgtttgcgactcgccggcgggtatcgaaaccggggcgctgatggcgctctattttgccgatgaagcgatcatcacgaccaacccggaagtctcttctgtccgtgactcggaccgtattctgggtattctggcatcgaaatctcgtcgcgcagaaaatggcgaagaaccgattaaagaacatctcctgttgacgcgctacaatccaggccgcgtcaataaaggcgacatgctcagcatggaagatgtactggagattctgcgtattaaactcgtcggtgtgatcccggaagatcaatccgtactgcgcgcatcgaaccagggcgaaccggtgattcttgacgccactgcggatgcgggtaaagcctatgcagataccgtagatcgtctgttgggagaagaacgtcctttccgcttcattgaagaagagaagaaaggtttcctcaaacgcctgttcggaggataaattatggcattactggatttttttctctcgcggaaaaagagtaccgctaatattgcaaaagagcggttgcaaatcattgtcgcggaacgtcgccgtagcgatgccgaaccgcattatttaccgcagttacgtaaagatattcttgaggtcatttgtaaatacgtacaaatcgatccggaaatggttaccgtccagcttgagcaaaaagatggtgatatctccatccttgaacttaacgtaacgctgccggaagccgaagagtcaaaataagctcttttatgggaaaattcctggattaaaaaaggcagaagaatctgccttttttatttttttacattattccgaatacggacatttatttcactggccgttttcccggcaattaccgtcgttaaagcggatactcctgcaacagaagagttaacttctcctccatcagttcggcgcgccagccggaaatcaattccggttgcccattttgcggttttaatttccagtgccagttaagcaactgattaatctgccgacgcgatgccagtagctcgccgctgacgtgatgcgacgcgctcacctccgccaccagcgctttgatggctttaaacgctttgcgatagcccggcatgtccatcagattcaacaggggttccggcaatgcctcttccggtagcgcctgtgctttcgccaccagcgatatcaacgtcttgccatgaaaacgaatctcgctgccggaaagccccaggctatccagctcaccgagactgcccggcatataacgcgcgaccgcccacagattttcttcacgcacaacaaagttcaccgccatatcgcgctcacgcgccttacgtagccgccagtcagctaaaagttgcagacaggctaactggcgagtacgcagttgccaggcattggtgatatcccgccatgcttcttccggcgcctgaatctcctgacggcgctgctgcatcaaccgacactcatcaagcgcggcaggcagccatcctgcggcttcagtttcaatcatcagctttttggcgatcggtaacagataccagacatccgccgccgcgtattcacactgacgttcgcttaaaggccgggctaaccagtcggtacgagactcgcttttgtccagcgccacgcccgtatactcttctaccatcgacgcaaaaccccacgacagcggacgcccgcaaaacgccgccagaatttgcgtatcaatcaggggttccggcagttcgccaaacgcattcagaaatacttccagatcttcgctacccgcgtgcagaaatttggtgattcccgtatcgcgcaacaccgcttttaacggcgaccagtcgctgatgccgagcggatcgatcagggcgacatttgccccgtcaaataactggatcaatcctaactgcgggtaataggtgcgggtacggacaaattccgtatctaaagcaatagccggacatgcgcggacagcctcacacaggctcgccagcgcatcgtccgtttcaatcatttggtaattcaaatcgtgttctctttggttcgcgccaaaaataaatatcctccggcatagccggaggtttttcagatgcgcctataaggctctcttaccagccgcgccctaacaggcgcatacgatctgacatttgcatcaaacttcgttacttacggcccgtaaacgggctgcccggatacgggatcgataattgctcacccattttatcctcttcaagctggtgctttatgtagtcctgtatcttcgccgtgttcttacccaccgtatcgacatagtaccctctgcaccagaactccctgttcctgtatttgaattttagatccccaaactgctcgtaaagcatcagactacttttacccttcagatatcccatgaaactcgacacactcatcttcggcgggatctccagaagcatgtgaatatgatctgcacaacattctgcttccagaattcgtacgtttttccattcacacaattttcttaatatgctgcctactgccctacgcttctctccatagaacgcttgtcttcggtatttgggcgcgaaaactatgtgatatttacagttccatcgggtgtgcgctaagctcttttcgtcccccattgggacccccttttgatttcttgttgaacttttgcagttgccagaccgcaagatgttttaacaaatcaaaaggggttttaataactggcttaaagctgaaagctttccggaacccccagcctagctgggggttttccatagacaaaaaaacgccggcttaaccggcgtctctcgttagctgacttaacgctcaggctttattgtctactttgccacgggcttcgtcacgcagttctcgtcgtaaaattttcccaacgttagattttggtaattcctcgcgaaactcgacctgtttgggcaccttatatccggtcagatggcgacggcagaaggtgatcaacgcatcgtcagtcaatgccggatctttcttaaccacaaaaagcttcaccgcttcgccgctactaccggaaggcacgccaaccgccgcgacttcctgcacgccagaatgctgcatcaccacatcttcaatttcgtttggataaacgttgaaaccagaaaccagaatcatatctttcttacgatcgacaatccgcagaaagccgtcttcatccataaccgcaatatcgcccgtatgcagccagccatctttaatgatttcatccgtcgcgtcaggacgctgccagtatcccagcataacctgcgggcctttcacgcaaagctctccggcctcacccggcgcgacttcgttgtcatcgtcatccaccagtttggcttctgttgacggtactggcaggccgatactgccgctgtgataatcaatatcatgcgggttgacgctcaccagcggggcgcactcggtcagcccgtagccttccagcaggtattgcccggtcagctttacccaacgttccgcaacgacgttttgcaccggcatcccgccgccggctgacagatgcagcgaagaaaaatccagctgttgaaactctttattattgagcagggcgttgaataacgtattaacgccagtcatcgccgtaaatggatatttcgccagctccttgaccagaccggggatatcacgcggattggtaatcagcaggttttgcccacccagctcgataaaaagcagacagttcatggttaaggcaaaaatgtgatacagcggcagcgcggtcactaccagctctttccccgggtgcagcagcggcccataggtcgctttcacctgctccagattcgccagcatattgcggtgggtcaacatcgcgcctttcgccacgcccgtcgtaccgccggtatattgcaggaaagccagatcttcagcgacaacctcgggtttgacatactgcatacggtagccatgctgtagcgcgctgcgaaacgagatcgcatctggcaagtggtattttggcaccagacgcttgatgtatttcacgacaaagttaacaaccgtacctttggcggtagaaagctggtcgcccatccgcgtcagaataacgtgctgtaccgacgttttctcgactactttttccagcgtatgggcaaagttagaaacaataatgattgccgccgcgccgctatcgttaagctgatgctcaagttcgcgcggcgtgtacagcgggttaacgttcaccacaatcatgccagcgcgtaaaataccaaatagcgcgacaggatactgcaacaggtttggcatcatcagcgccacacggtcgccttttttgagtcccagcccttgttgtaaataagccgcaaatgcccgactacgttcttctaatttacggaaggtcattacctcccccatattgacgaacgcaggctgatcggcatagcgcgtcgccgcatgttcaaacagttcaaccagggattgataacggtcagggttgatctccgccggaacatcagcaggataacggttaagccaaaccttcttcaatgcatcacctctaaaatgagtgttcgtcgtcatcacaaccccagttaataaacaagtcgttaacattatattaactcagcgtaccagtttattaattacgcaactgaaaggttgcgaagcgcgtcactatttatttttattatgtctctatgaatgcagaaacagcggaccagccgctgtttcttttattgataaaacaaagagttactctgttactatcgtctgaacctccgcgggtccagggttataccatccccaaccgccatagccataaggccaggcgcgtccgccgtaaaaccacggatcgatcggctgtggaggcatgacgacctgctgaacaagatgccagcgtttatagccggtagcctgcatcagcataaatttatacggcgtattgccgattttaccgtcaaccgtgccggttatcgggccgacaacggtaactaactggccacggaagtccaccgggtccagaaaaccgttcacatcggcaaaaattctgccgcgcgaggcttcgcccagaacaggacgcgcgccgctatcaagcggtacggtcgcgatttcaagccgggtttttccctgctgattttgcaccgccacaactttgccgccaaaacgcgcctcttgcccgatatagagctgcggcgcattcatcacccgcaccaaatcctgctgcggcgtcggactcgaacctttaatggcatccgggatagtcacgcaaccgctcagcataagcgcaaaagcgcacgccagcgccccttttattaaccgtttttgaaccgccatgatgcgactcctttttctcgacctctattccaccccacagcataaagtatggggggtaatagtagtgagagtcattctttgccgggaagtttcttccacgccacttcgttacgcaaataaaccggctcggcatgttccacggcaacggtctctcctgccgccagcttttgactggcgatgggcaacatatcttccgctgccgggagcgacacctccccatcatgaagcgtcaggccgcattccttcgccagatcgggccacgcggaccaacccgttcctacggtcgcccactcgccggaaagctgtttcaaccgctcgccgacccgttccggtttcagcaccgcttccgtctcttcgccctgccagacgccctgcgcatcacgctggtattccgcccagtacacttcgcccatccgcgcatcaatcgcggcgagtacgcgggtcgcgccggttttacgccatgcaccctgcgccatcgtggcaagcgttgaaacaccgatcatcggcagatttgcccctaacgccagcccttgcgcaataccaatgccgatacgcacgccggtaaagctgcccggaccgcgcccaaacgccagcgcatctatctcattgagcgaggcgccgctggcggccagaatctcctgcaccatgggcaggatacgttgagtgtgttctcgtggacaaagctcaaagtgagcattgatagtaccgttgttccacagggcgacagaacaggcctctgtggcggtatcgatagccagaattcgcatgaggtttcgtgcttagatcaataaaatagcgcgcatcttaccatactccgtaacaaattactcggcggatggaatcgcaagaaagcgaacggcacgggcgatatcacgcgtgcgcggcgcaggaggcaggctggcgagaaacgtggcgccatagggccgcatcaccagccggttatcacaaatcactaacaccccgcgatcgtccgcatcgcgaatcagccgccccaccccctgcttcagcgtaatcaccgcgtcgggcagttgaacctcatcaaacggatcgccaccgcgcaaacgacagtcttccattcgcgcttttaacagcgggtcgtccggggaggtaaacggcaatttgtcgataatcaccaacgataacgtatcgccgcgcacgtccaccccttcccagaagctgctggtggcgacgagcagcgcgttgccggcgctaacaaattgctgtaacagttggcctttactggtttccccttgcaacaataccggcagcgtcatggtggcgcgaaactgctccgccaaatcgcgcatcatggcgtgtgaggtgcacagcataaaacatcgcccgttattggcttcgataatcggcctgagcatagccgccaactgtcgcgccgcgccgggctggttggtttgcggtaggttacgcggtacgcagagtaacgcctggcgcgtatagtcgaatgggctgggcagtagcatggattctgcctgttcaattccaagacgggcggtaaagtggtgaagatcatcatttaccgacaacgtggctgaggtaaaaatccagctaccgggcttctgttccatcacctctttgaatttgtccgccacggtgagcggcgtcagcgccagggtgaaatggcgcgaggtgcactcataccagtagctgtatcccggctgattgatctcttttaagcgtttcagccgtgaacggtatagcgtggcgcgttcaaaagccgcatccagcagcgccgaacggcccagcgacagcttcgccacgtcgtaacaaagctccagcgtatcatccagcagtaaaaatgcccgttggatacgtgagtcggctaacagttcacgcaaatttccccggtagccgggctcccccagttgcagacgaaaatcctgggcgctctgggcaaggcgatcggcgcatttttgcaactgttgagtgtctttcagttccgtccggtaggcgatggtgatgtcttttgctaaatccagcaactgacggctggagagcgattgtccgaaatactggctggcgatgtcaggcagttggtgggcttcatcgaagatcattacttcagcctgagggataagttcgccaaacccgctctctttaaccaccatatccgcaagaaataggtggtggtttacaatcaccacatccgcgtccatcgcctttttacgcgctttcaccacaaagcactctttgtagagcgggcaatcgctgccaaggcagttgtcgttggtactggtgaccaacggccaggcctgggaatcctccgccacgctgacgcaggtgctgatatcgccatcccgcgtctgatttgaccaggagcgcagcaatatcacgtcgcttaacgtttgtaccggtaaatcgccgcccgccagcgcttgttgttccagccgctccaggcagaggtagtttgaacgtcctttcaacagggccgtcttaccggtaaacgccaacgcttttgctaccgtcggcagatcgcggctgtagagttgatcctgcaacgctttcgacccggtcgaaataatgacttttttcccggcgcgcaacgccggagcgaggtaagcataggtcttcccggttccggtgccggcttcaacaaccagaggctgcgcattttcaatcgcttgtgttacggcaaccgccatttgtcgctgtggttcgcgcggtttaaagccggttatcgctttggccagttggccatctgctgcaaaatcgtccgtcacactgccccctgttaatttgcacagggattatgtcagggtagaaaggcttacgccagttacagaggtgacggcggcgccacattgtggcagtcttgaaccattcaaatgaaaagcaaatgaggaataagtaatgtctatcgtgcgtattgatgccgaagatcgttggtcagacgtggtgatctacaataatacgctgtggtataccggcgtgccggaaaacctggacgccgatgcttttgagcaaacggcgaatactctggcgcaaattgatgcggtgctggaaaaacagggctccagtaagtcacgtattctggatgccactatttttctgagcgataaagcggattttgccgccatgaataaggcgtgggatgcgtgggtcgtcgcaggccatgcgccggtacgctgtaccgtacaggccgggttgatgaacccgaaatataaagttgagattaagattgtcgcggcggtataagccggttattcgtcttcatcctcaaaacgcgccactatccgttcgccggtatggttggcgcgaagttcgcccgccacctgggcaatcgcttctccgctactcataccttgcgacatcaattcctggatacgttctacggctttttgctgttgttcatgactgagtgaaggtaaacctgcaaacatgattaactcctgctaaattgttagcgctaattatttcacgctacccggcggtaagccagtagtgttgtaacgagtcaggaatgatgaagacgttatctcccactgttatcaccttaccctggcgtccggacgccgctgaacactattttgcgcccgtaaaccatttgccctgggcgatgctgctgcattcaggtgatgctattcatccctataaccgttttgatattctggtcgccgatcctgtcaccacactgaccacgcgcgcgcaggaaaccacggtatgtactgcgcgcacgactaccgtcactctcgacgatccgttacacgttttgcagactcaactggaggcgctgccttttcatcctcagcctgaccctgacttaccctttcagggcggcgcgctgggtctgtttggttatgatttagggcggcgtttcgaaattttgcccgatactgccgcgcgcgatatcgctttacccgatatggcgattggcctttacgactgggcgctgattgtcgatcaccaaaaacaggtggtgtcgctgataagctatcacgatgcagacgcccgatatcgctggctcaccagccagcgcgcgccgacccgcacgcccttcaggcttacctcagcctggcaatccaatatgacgcgttgcgagtatggcgagaagtttcgtcaggtgcaggcctggctgcacagcggggactgctatcaggtcaatctttcccagcgttttcaggcgagctacgagggtgatgaatggcaggctttcgaacgccttaaccgcgccaatcgcgccccgttcagcgcctttcttcgtttacatgacggcgccatattgagcctttctcccgagcgttttatccaactggagaatggtcatatccagacgcgcccgatcaaaggtacgcttccacggcttaacgatccgcaggcggatcgtcagcaggcgcagaaactggctaattcaatgaaagatcgcgctgaaaatttgatgattgtcgatttgatgcgtaacgatattggccgggtcgccgtaccaggttcggtgaaagtgccggaactgttcgtcgtcgaaccatttcctgccgttcaccatctggttagcaccattaccgcccgtttaccggactcgcttcatgctaccgacctgctgcgcgcggctttccccggcggctccattaccggcgcgcctaaagtgcgggcaatggaaattatcgacgaactggagccgcagcgacgcaacgcctggtgcggtagcatcggttatctgagtttctgcggcaagatggataccagtattactatccgcaccgtcacggcaacgcagggccaactctattgctcagccggcggcggtatcgtggccgatagcaacgaagaagcggaatatcaggaaacttttgataaagttaatcgtatcctgcacccactggagaactaatacgtggataccagccgtctgacgctcgatcatttcttatcgcgctttcagcttttgcgcccgcagatgactcatgaaacgttaaatcaacgtcaggccgccgtactgatccctgtggttcgccgcccccagccggggctgctgttgacccagcgggctattcatttgcgcaaacacgccggacaggtcgcctttcccggcggggccgtggacagtaccgatgcttcgcttatcgccgcagcgcttcgcgaagcgcaggaggaagtcgccatcccgccgcaagccgtggaagtgattggcgttttaccgccggtagacagcgtgaccggttttcaggtcaccccggtggtcggcattattccgccaaatctcccctggcgcgccagtgaagacgaagtgtctgcggtgtttgaaatgccgctggcgcaagcgttgcaactggggcgatatcatccgcttgatgtttaccgtcgcggcaattcgcaccgcgtatggctctcctggtatgagcattatttcgtctggggcatgaccgcaaacattcttcgtgagctggcgctgcaaattggcgtaaagccctgactgtacacaacgccattcacgttgcctcaaggcggtaacaatcgcctcccccaaagaggcagcctgaagggcaacgtgtatatacttaactttacgcgcgtaagacacgacttgagattactgtcgcaatattagtaaaaacgcggttattcattagtttaattcatgtgaatagttaagctgatgccagcgttccctcttacactatgcgcagttataacatcgtaaccggaagccccggttgccctgtcaggagtattatcgtgattagcctattcgacatgtttaaggtagggattggtccctcctcttcccacactgttggcccgatgaaggccggtaaacagttcgtcgatgacctggtcgaaaaaggattactggataacgttacccgcgtcgctgtcgatgtctacggctcgctgtcgctgacggggaaaggtcaccataccgatatcgccattattatgggtctggcgggtaatgaacccgctaccgtggatattgatagtatccccggttttattcgcgacgtcgaaacgcgcgagcgtctgttactggcccagggacgtcacgaagtcgacttcccgaaagatgacggaatgcgttttcacaacggcaatttgccgctgcatgaaaacgggatgcagatccacgcctggcatgacgacacggtcatttatagcaagacgtactattccatcggcggcggctttatcgttgatgaagagcatttcggccaggaagcgacgaatgaggttactgtaccttatccgtttaaatcggcgaaagaaatgctggagtattgcaacagtaccggcctttcactctccggcatggtgatgcaaaacgaactggcgctgcatagcaagaaagagattgaagagtatttcggtcacgtctggcagaccatgcaggcctgtattgatcgtggtatgaataccgaaggcgtgctgccggggccgctgcgcgtaccgcgtcgcgcctctgcgctgcgtcgtatgctggtttccagcgataagctttccagcgatccgatgaacgtcattgactgggtgaacatgtttgctctggcggtgaacgaagagaacgccgcaggcggccgcgtcgtgacggcgccaaccaacggcgcgtgcggtatcgttcctgcggtactggcttactacgaccattttattgaatcagtcagcccggatatttacacccgctacttcctggcggcaggcgctattggcgcgctgtataagatgaacgcgtctatttccggcgcggaagtcggctgtcagggcgaagtcggggtcgcctgttcgatggcggcggcaggccttgctgaactgttgggcgccagcccggagcaggtttgcgttgccgctgaaatcggcatggagcataacctggggctgacctgcgacccggttgccggtcaggtgcaggtgccgtgtatcgagcgtaacgccattgcttcggttaaagcgatcaacgctgcgcgtatggccatgcatcgaaccagcgcgccgcgcgtctcgttggataaagtcatcgaaacgatgtacgagaccggaaaagacatgaacgcaaaataccgcgaaacgtcgcgcggcgggttggctattaaagtccagtgtgattaaacgccgtttcccctcccttcgcccatctgctacggatgggcgaaatttttatctcttcctcgtcgactccacgtttccccactacacttgctgtgtcgcggttggcttttgtcgccaacgcttattgggcggcccgcatgcaaacagcacaacggatcatcaatcattatcgccgtaatcgtttcattgtttgcacgatttgtgcactggtcacgctcattcttacgctgaacatccgatttatttcggagcggaacttaaatcaccatcgcacggttgcattcgcgaatcatgccgttgatgcgctggataatgtgctgcatcctctcctggtcggacgaaacatactgctccccttgcttgagcttccgtgcgcgaccgcgcatttgccgttgcgtaagcaagccgcccgcctacaaaccattcgttctatcgggctggtaaaagagggaattctctattgctcaagcatttttggcgcccgtaatactcccatacgccagcttcagcccgatcttcccgcagtcggcgatctgctgctactttccacagaccaatcgttactcaagggaagcccgatcctcattcagtggtatcccgcctctgccgatggccaggatggcgtgatggaaattgtgaatattgacttgctgacgactatgctacttgagccgcagcagccgcaaattaccagcgccagcctgacggtcggcaaacgacacctgttatatggtcggggcgtggtcgatactcttccggaattaaaaaaagatgaagagcgttaccagctttcatcgcgacatttcccttttactatcagcgtcagcgggccgtcggcaggcgtactggcgttcaaacatctcccgacgcagttaccgctggccgtattgcttagcctgttgatcggttatatcgcctggctggcaacggccagcagaatgagcttttcctgggaaattaatctggcccttgccgaacgggagtttgagctattttgtcagccgttgcttaatgcccgcacgcagcagtgtaccggcgttgagatcctgttacgctggaacaacccgcgccagggctggatctcaccggatgtttttattcctatcgccgaggaacataacctgatagcgccgctgacccgctatgtgattgcggaaaccattcggcagcggcactacttccccatcaaccatcagtttcatatcggcatcaatgtagcggcaagccatttccgacacggcgtgcttctcaaagatcttaatcagtactggtttagtgcggaacctgttcagcaactggtgctggagctcacggaacgcgacgcgttgcttgacgttgattaccgcctgatgcgcgagctgcatcgtaaaggcgtgaagttagccatcgatgattttggcacaggaaacagctcgctctcctggctggaaaaactgcggccggatattttgaaaatcgataaatccttcaccgccgccatcggtaccgatgcggtcaattcaacggtgaccgatattattatcgcgctggggcaaagactgaatattgaactggtggcggaaggggtcgaaaaccagacgcaggcacagcatttgcgccagcatggcgtgcaaatgttacagggctatctctatgcgaagccgatgcccattagcgaatttccacagtggctggcgggcagcgcgccgccgcccgcccggcataacggacagattatgtccgcgatgccgcatctatagacttgattcctgcgtgtgacgttattcctcttcgtcgtgggcaggctgttctttaacaattcgaaccagatcgacacgatagtcgttggcctcgacaatggtgatccgcaggggcggaacatcaatgacatcgcctacacgaggaatatggccattagcggcgatcactaaccccgcgaccgtcgcaatatcgccctcttcgttcaccagatggtcaacttccagcgcctgctgtagcgcatggagatcggtgccacccttcactatccagccctcggcatcggcaacgatttccggcgtttcatcggcatccgggaactcaccggcaatcgcttccagcacatccagcggcgtaaccagcccctgcaccacgccgaactcgttagtgacgataacgaaactgccgcgcgcgcggcgcaaaacgcctaacagattgataggatcaagcgtttccggcaccactatcgccggggaagacgcggcgatagccgcaacatccgcgccctcttccagcgccaccagcaactctttcgcgcgaacgataccgataatttcatccagctcgccccgacataccgggaacaggctatgcggagaagagagtaactgctgacggatttcagctacgctgagattcgcatccacccaactaatttcgcctcgcggcgtcataatgccgcgcagggagcgcgacgccagagtcagtacgccgttaatcatgtagcgttcttcttcggcgaaggcgccttccgacaccgatatcgcggccgggctatccgtttcatgttgcgtactcgcctggcgtttaccgcccatcagacgcaggatagcgtccgcagtacgcgcgcgcagcggcaacgtggactgatgacgaataaagttgcggcgcgcaatctggttaaacacctcgataacgatcgagaaaccaattgccgcgtacaggtagcctttcggaatatggaaaccaaacccttccgccaccaggctcaagccgatcatcagcaggaaactcagacagagcaccaccaccgtcggatgctggttgacaaaacgggtcagcggttttgacgccagtagcatcaccgccatcgcaatcaccaccgccgccatcataaccggcagatggtttaccatacctaccgccgtaatcacggcgtccagcgagaagaccgcatccaggatgacaatctgcgtgactaccacccagaagctcgcatagcctttaccgtgtccggtgtcatgctcgcggttttccagacgttcatgcagctcggtggtcgctttaaacagcaggaatataccgcccagcagcataattaaatcgcggccggagaaggtaaaatcccagacggtaaagagcggctttgttaaggtcaccagccacgaaataatggacagcagcgccagacgcataatcagcgccagcgagagcccgataagacgcgctttgtcacgctgctttggcggcaatttatcggcgaggatcgcgataaagaccaggttatcgatacccagaacaatttccaggacgacgagcgtgagtaaacccacccaaattgagggatccattaataattccatgacaagctcctgcttaaggaatgactaaacggcgcccacaacatctcaaaggatgcaggcggtaacgcaataaacaaagtaaggctatggcaagatatgccagattgacaggcgcaaaacggccaaagagtgaaatgacgtcggtgacgatccatacaacgggctgctgccctataccccattctaattaaacggaagctaaacataacagagacaactggtttttggcaaagatttaccttcctttgcaaagagatgtaaccaggatattttacacttcgaaatttctcattatcgaaaacaaaattacggatctccatcacacaaaatatttttttcgatatctaaaataattcacgaaaatcatgcgtttttcgttgtaaccctcatctgaatcgattcgcttgcggacggcgattcaaaaaatacatctgtcaagttgatgtgttgacaataataaaggaggtagcaagtgaccattgctattgttataggcacacatggttgggctgcagagcagttacttaaaacagccgaaatgctgttaggcgagcaggaaaacgtcggctggatcgatttcgttccaggcgaaaatgccgaaacgctgatcgaaaagtacaacgctcagttggctaaactcgataccagtaaaggcgtgctatttctcgttgatacatggggaggcagtccgtttaatgctgccagccgcattgtcgtcgataaagagcgctatgaagttattgccggcgtcaacatcccgatgctggtcgaaacgtttatggctcgtgacgacgatccgagctttgacgagctggtcgcactggcggtagaaaccggtcgtgaaggcgtaaaagcgctgaaagcgaaaccggtagaaaaagccgcgccagcgccagtcgccgccgcgccaaaagcggccgcaccggcaaaaccgatgggcccgaatgattatatggttatcgggcttgcccgtattgatgaccgcctcattcacggtcaggtcgctacccgctggaccaaagagaccaatgtcagccgtattattgttgtgagcgatgaagtggcggcggataccgttcgtaaaacgctgctgacgcaagttgcgccgccgggcgttacggcgcatgtggttgacgtcgcgaagatgattcgcgtctacaataacccgaaatacgccggcgaacgcgtgatgcttctgtttaccaatcctaccgacgtcgagcgcatcgttgagggcggcgtgaaagtcacttccgtgaacattggcggtatggcctatcgtcaaggtaaaacgcaggtgaacaacgccgtttccgtcgatgaaaaggatatcgaagcctttaaaaagctcaacgagcgcggcatcgagcttgaggtgcgtaaagtttccaccgatccgaaactgaaaatgatggatttaattgccaaagtggcgaaataaccgccggcatttaattagctttcacacttaagatagcaataggagaagtacaatggagattaccactcttcagattgtgctggtgttcatcgtcgcatgtatcgcgggtatggagtcggtacttgatgaatttcagttccaccgtccgctgatcgcctgtaccttaatcggcgccgttctgggggacatgaaaaccggtattatcatcggcggtactctggaaatgatcgctctgggctggatgaacatcggtgctgccgttgcgcctgatgccgcactggcgtccatcatctctaccgttctggtcatcgccgggcatcaaagcattggcgccggtatcgcgctggcgattccgctggcggcggcaggccaggtactgaccattatcgttcgtaccatcaccgtggcattccagcacgcggcggacaaggcggctgaaaacggcaacctgacggcgctctcctggctgcacgtttcttctctgttcctgcaggcaatgcgtatcgctatcccggcggttatcgttgccatctccgtaggcaccagcgaagtacagggaatgctgaatgcgattcctgaagtcgtcacaggcggtctgaacatcgccggcggcatgatcgtcgtggttggttatgcgatggttatcaatatgatgcgcgcaggctacctgatgccgttcttctacctcggtttcgtcaccgcggctttcacaaacttcaacctggtcgcactgggtgtcatcggcgcagtgatggctattctttacatccagctgagcccgaaatacaaccgtgtagcgggcgcgcctgcagcggctgctggcaataacgatctcgataacgaactggactaacaggtgagcgaaatggttgatatgactaaaactaccaccgagaaaaaactcactccgagcgatattcgcggcgtatttcttcgttctaacctgttccaggggtcatggaacttcgaacgtatgcaagcgctgggcttctgcttctctatggtgccggcgattcgtcgcctgtatccggagaataatgacgcgcgtaaacaggcgattaaacgtcacctggagttctttaacactcatccttacgttgcggcgccggtactgggcgtgaccctggcaatggaagaaaagcgtgcgaacggtgcagagattgacgatggcgctatcaacggtatcaaagtcggtctgatgggaccgctggcaggcgtcggcgaccctatcttctggggtaccgtccgtcccgtattcgcggcgctgggcgcaggtattgcaatgagcggcagcctgcttggtccgctgctgtttttcatcctgtttaacctggtgcgtctggcgacccgttattatggcgtggcttatggctaccgcaaaggcgtcgatatcgttaaagatatgggcggcggcttcctgcaaaaactgactgagggggcgtcaatcctcggcctgtttgtcatgggggcattggttaacaagtggacgcatgtgaatatcccgctggtggtttccaccatcaccggtcaggatggtcagacacgcgttaccaccgtgcaaaccattctcgaccagctgatgccgggtctggttccgctactgttgacctttgcctgtatgtggctgctgcgtaagaaagttaacccgctgtggattatcgtgggcttcttcgtcattggtatcgccggctactccgtaggactgctgggccagtaaggctgttgtacactaccggggccaaacggccccgttttttatttctctggaggataaatgactatcacggacctggtgctgattctctttattgccgcattattggcttacgctctctacgatcagttcatcatgccccgtcgcaatggccccactctgctttctatagccctgctccgccgcggtcgcgtagacagcgttatcttcgttgggctggtcgccatccttatttataacaacgtaaccagccacggagcgcagatgaccacatggttattaagcgcgctggcgttaatggggttttatatattctggatccgcacgccacggatcatctttaaacaacgtggctttttcttcgccaatgtctggatagaatataaccgtattaaagagatgaatttatcggaagacggcgtactggtgatgcaattagaacaacgacgcttgcttatccgtgtacgcaatatcgacgatctggaaaaaatatataaacttcttattgaaaatcaatagcttaagatatagcctcaactatgtttttcgaattttatttcgaatcataatatagctaaggctatattttctattgaccaattgttatttaatttaacgttttattgatgaataaatctaaatgaaaatcgttttcaattgaaagacaaataatattttatcgctgttgttttatattctaaaaatatgttaatgttgcgccgtcaattggggagtagccgatttccagactccggaaatgtacgtgtcaacatactcgttgcaaaacgtggcgcgtacggaccagccgccgctggtcaggcgagaccataggcgcatcaactgctgtgtatttcgtcacagaatggcgacatgcatgtttgctgggggcagtgatgtgtttaatggataccccggtcaggacgttgtcatgcactttactgctactgttcttctcgctttcggcatgtcgatggatgctttcgcggcatcaattggcaaaggcgccaccctacataaacccaaattctcagaagcgttgcgtaccggtcttatctttggcgcggttgaaacgctaaccccgttgatcggctgggggctggggatattggcgagtaaattcgttctggaatggaaccactggatagcctttgttctgctgatctttctgggcggacgcatgatcatcgaaggtatccgcggcggtagtgatgaagatgaaacaccgttacgtcgtcacagcttttggctattagtcacgacggctatcgcgaccagcctcgatgcgatggcggttggcgtcggtctggcgtttttgcaggtaaacatcatcgctaccgcattagctatcggttgcgccacgcttatcatgtccaccctagggatgatgatcggtcgctttatcggcccaatgctgggtaagcgtgctgaaattctcggcggggtcgtactgataggaattggcgtccagatcctctggacgcattttcacggttaacggttacgctgccagagatgaaggttgaaatccgtctggcagctaagtccggcgctggcagccagttgttcccacacgtctggcctggcgcgccaggcaaatggcgtcatttgcaacagtgctacagccgcttcggcggtgagctgcatgtgataagcaaggcgggtactctgctgcaatgtgaatccgtcgagctgctcggtatacggcgcatgtaaacgcacctcatcataaatgagcccttttagttccatcagatgatgcggccctggcgtggcggtaacgacccaaccaccaggtttcaccacacgcgccaattcctgcgccttacacggggcgtagattctgatcaccgcatccattgacgcatcggcaaagggcagtcgatggcttgacgccacacaaaacttcacctgcgaatagcgtttcgccgccgctttgatcgccgttttagcaacgtccagtccaaacgtggtgactcccggcaacgcctcggcaaaagcatgagtgtaatacccctcgccgcagccgatatccagaatcgccgtggccgactgatccagccgctcgcgcaacaggttaatcacggcatcgcgcagcggctgataatggcctgcatcaagaaacgctctcctcgcctgcatcatttcggcgctgtcgcccggatcgcgcgaacgtttatgctgtaccggcagcagattgatgtaaccctctttcgccacatcaaactgatggcgctgtggacatataacgctgttattaatctgcgtaagcggctgatggcaaagcggacaggtaaacgacatgacaactccggactggggcgctaaagggcgcaagtgtaacgcgaattgcgccccgggaaaatcctttacgaacccggaaccgcaacgtggctgccatgcatcaccagaaggtgatctgaatcggctggcataccgtctggctcaacattttccagccgcagcacatcgcccatgatctggctgaatacgggcgcagataccgcaccgccataataagccccattttgcggattattaatcaccaccaccagcgcaaatctggggttacttgccggcgcgacgcctgcggtatatgccacatacttatcgacgtatttaccatcatcgccaatttttttcgccgtcccggttttgaccgcaatacggtagtctcttactgcggcttttgttccgccgccgccaggcaacgcgacgctctccatcatatgttccacctcgtgcaccagttcttccggcattacccgcgtgccgatcacgggcggatcaactttggtgatcgataacggacggtagataccaaagctgccaatcgtggcataaacatgcgccagttgcagcggcgtcaccattaatccatagccaaaagcaaaggtagcgcgatctaaatcactccagtaacggcgtttcggtaataacccgctgctctctccggtgagacccagtccggtaggcacgccgaaaccaaagcttttataagtatccattaatttctgcaccggcatcgccagagaaaggtgagaaacgccggtatcgctggatttttgcaaaatgccggttaatgtcagttccggatagtaaccgacgtcgcggatacggtgtccatcgagagtaaaaggatgggtatcgataacgctgtccggctgcacgatgccctgctgtaacgcagtcataatgaccaatggcttcacagtagaaccgggttcgaaggtgtcgctaatcgcgcggttacgaaaatcgtccaactgcgcgccttcacggttgttcgggttgaaatccgggtagctcgccatcgagagaatttcacccgttgggatgttaatcaatacggcagcgccggattccgctttgttccagatgacggcgttatccagcgcatcttcggtaaccgtttgcagacgttcatcaatgctaagctgaagttcatgagcaggaaccggattcacttccgtaatgttctcaataacgtgaccaaatttatctttacgcaccaatcgggagcccggttttcccgtcagttgcgcgttaaagctcttttcaataccttctattccctgcccgtcgatattggtaaagccgatcaaattggccgctacgtgtccggcagggtaaaaacggcgcgactcttcccgcaggttaatacccggtagattcagtttatctatccattcggcttgctggggtgaaacctggcgcgcaaggtagataaaacggcctgccgggttactgtttacccgttccgcaagcgtactgagagacagatgcagggcgctggccagcgcctgccagcgctcattgtagccaacgccgcctttgcttatgatagtcttcggatcggcccagacagcattaaccggaacgctcaccgctaagggtcgcccttctctgtcggtgatcatgccgcgtggagaggccgtggtcacttcacgaagcgagcgcatatcttcttgtttcaccagtttcgacggcgtaacaatttgcagccatgccacccgccctaacaacaatgccatactgagcagaatggcagtgcaaagtagtgcaaaacgtatgggcgtaaaattacgggtatcgccgtcgcttttctttttcacctgatctccagccgaatcatttttcaggtgattgatttaacgggaaacggccggaaaaaccagaaaaaacaatgctaataacatcgcgcctttgcaacaaatcgctaacgagagcgcatccagacacattttgaaggatattgaattaaaaagccccgcttttagcgaggctttatatctgaggctgacgcgacaaacgcatcaaatcagtggtgtcgatcagatagctgttacgttaacagcagccggacctttctggccgtcctgaatttcgaactcaacgttctggccttcagccagagttttgaaaccattgccctggatagcggagaagtgtacgaacacatctttgctgccgtcagccggagtaatgaagccaaaacctttggattcgttgaaccacttaacttgacctttaatctttgccatttgcaaaattccttagagtgttttctttgcccgtaggcataacatagataaaactgagacattactgcttgaggcactaatataaggttcggcagagaagcggtattcaacgtcaacgtgtttactcaggacttctttactgaaaatgccacacataaacagaactgtacctcgtttaacccaaagcctgttatcacatacaacgttaattatggcaagccatttttaaacgtgtctcgatccgtcgcacaaattacgagaaccttcacaaattgacagcacgtttatgcaacaaaattgcgaaagatatatcctcacgcgctgacggactcctgacaacgtcactgctgaaaagccatttttctaccatagctcaataacttcgcttcttccagtgcatcaaatcacatttaaaagctgtatttttcatatcactttttatgctgagttatgcataaattgtcacaatgataaaaaacaccttttaatcaaaataatagaaaagaaaagcgattttcggcaccgctttttgtgatgttctgcgtctttacagaatgccttaaaataatgaacaaacaatgacaatccataaagagagagaaacgtttcgcttttaatagagaatgagcggtatcacaaaaatgccatatgtccatttgttatacatataaaactatgttgcatataaagccatatattatgtaaggtgttgatgctgtagtatcagttgcaaacggcaacgcggagagatccgacggggaaatggggcgtatggcactggcgccatttgcgccccggtaagcattatcgttctgcaaccagacgaatgatgtcctcatcctcttttggttcgcttgccgctgttgcgggttccgcttctttttctggttcgtttgcttcgcaaaggcgacgtaacaacgcgttttgccgcttctgttgatccaataacgcttcgagcaattctatctgctcgttggcacgggagcttgcccggttgacaaagaaccagagcgccagccccaccaccagaaccaccattgatactattaaagatgcaagagaaaacgcaccagagtttaaaacgtcgttcatttcaccacctcaatgtagagacgtcattctaccactgctacacgggaaggaaatctctggtgtaaaacgtttaccagggaataaatttattgatggcgcaaataccgctgaaaaattgtacatcctgatcgcacatgatattaaacacctgcgcccacagcaacaggcatactaccaccacgatgccgagaacgacccatcgaaattttttcactccactctccgatcttacatcttatgtcgctaaattatcatgagttacttaaaccaggagtaactgtagcggcattatatgtttttaggaatgattcacttgtttcaatcaatgtacacgctactcttattctaactaaaaaagaaaagaggtagtaatgcgtttgatcattcgcgcaattgtattgtttgccctggtgtggataggcctgctgatgagcggctatggcatcctggtgggaagtaaagtgaacgctgcggggctgggtttacagtgccattacctgaccgcacgcggcaccagcacggcgcaatatctccataccaacagcggcattattggcttttccgactgtcccattttcagaaaaatcgccaccgtggtggataatggctaagcggcaataaataatttcacagtgaaactatcaccaataattcccctatattggctgttgttcataagtactgttaaataatattttaataaccgttaaataagccgacagatattatctacttttacgatttcatcccacccgatgttataaaaaaagcagctacatttttcgtagctgcttttttttaacgtcatgctaataacgttgcttagaagggataatcgttgtaacccatttgttcagaaattttacgcgcggcggcgtgtaacatagccacatattcctgtaggcgttcttctgaaaaacgcagcgtcgggaacgaaatgcttaaccctgcgatgactacgccaaaacggtcaaataccggtacgccgatacaacgtaatccttcttcctgttcttcgttatcttcaccgtatccttgcgcacgcacttcatccaacagcggcagcaacgcttcagtgctggtaatcgtgcgtcccgtgctttgcttatactctacgccgtcgagaatctgcttaacctcatcacggtcgcgccaggccagaagcactttaccgatggccgtactgtacagcggattacgacgcccaatacgtgagtacatccgcagattgtacatagagtcaattttatggatatagacaatgctgtcttcatccagcgcgccaagatggatagtttcttttgtcagacgagacagttcgcgcatctgaatgtccgcactgcggatgagatcaacattttgcaaagctcgcgcgcccagctcaaacagctttagcgtcagagagtatttttcagactccccctcctgagccacgtagcccagcgttttcatggtttgcaaaaagcgataaacggtgcttttcgacatcatgacgcgctgcgatagctcggtaatccctatttcacgctcttcacccagcgcctgcagaatgccgaaaactttcagcacagaagatacagaatcaggctgcttatccagatctgcgtttgccatttatcacctcattacgagcgttttataaaattcagaacgagtttttattataatttcacgccaggtcgcccgcaatccatctttgcttacttcgttacaaatctgcgacataacaactcagtattaatgctaacattattattcagctcataattccccttattacaaaatacttatggaaaaaacacgggccgatggcctgcccctcccgcagagatacggcgctatcctgacgattattatcggtatttcgatggcggttctggatggcgcaatcgctaatgtcgcgctgccaaccattgcgactgatttacatgcctcccctgccagctctatctggattgtcaatgcgtaccaaatcgccattgtcgtctcactgctttccctgtcttttttaggcgacatgtttggttatcaccggatctataaatgtggtttagtggtatttctgctttcatcattgttttgcgcgctttcagactcgctgcagatgctgacgctggcgcgcatcgcgcagggatttggcggcgcggcgctaatgagcgtaaacacggcgctgattcgtcttatctacccccagcgtcatctgggacgaggcatgggaattaactcttttatcgtcgccgtctcttccgccgcgggtccgacgatcgccgcggcgattttatccatctcatcatggaaatggctgtttctgattaatgtcccgttaggtatcatcgcgttaattctggccatccgctttttaccagcaaacatcgcccatgacactaagccgcgctttgacttaccgagcgcggtaatgaatgcgctcacatttggcctgctgattaccgcattgagcggatttgcccagggacagtcgctaacgttgattggcgcagagctgctcgttctggtcgtggtcgggtttttcttcgtgcgccgccagctttctttgcccgtccctttgttacccatcgacttgttacgcattccgcttttttcactctcgatcggcacgtcaatttgctcgttctgcgcgcaaatgttagccatggtctcgctacctttttatctgcaaaccgtgctgggccgtagcgaagtagaaaccggcctgttattgacgccctggccgctggcaacgatggtgatggcgccgctggcgggatacctgatagaacgtcttcatgccggtttgctgggggcgctgggaatggtgataatggcagccgggttgtttgcgctggtcatgttgcctgcctccccctccgatctgaatattatctggccaatgatcctttgtggcgcagggtttggcctgttccagtcgccgaataatcacaccattatcacttccgcgccgcgtgagcgcagcggtggcgccagcgggatgctgggcacggcgcgactgttaggccaaagtactggcgccgcgctggtagcgctgatgttgaaccagtttggcgatagcggtacgcatctttcgctgctcgcagcggcgatcctggcgactctcgcggcggtagtgagcggtttacgtattacgcaaccacgcgttcaggcgtaaaaaaagcgcgtcattcgacgcgcttttcatacttgccagtgggcttattatttcaggtactcgccgctacgcagcgcttcaatgcgtttatccagcggtgggtgcgtcataaacagctcgcttaacgatttcgatttaccgttaatacaaaacgccatcatgctggtcgcttcttgcggctcgtagctggttttcaggcgctgcaacgcggcaatcattttttcacgaccaaccagcttcgccgatcccgcatcggcatgaaactcacggtaacgggagaaccacatggtgataatgcttgccagaataccgaagaccagttccagcaccgtcgcaacggcgaaatagattagcggattaccgttacttccttcgccttcatcacggttgccgcccagaaaacctgcagcaatttgcgcgataatgcgcgaaataaagataacgaaggtgttaaccaccccctgaatcaacgtcatcgtcaccatatcgccattggcaatatggctgatttcatgcgcaatgacggcttccgcctcgtcagggctcatattttgcaacagaccggtgctcacagcgaccaatgaggcgtcacggcgggcgcccgtcgcaaacgcgttaatgtccggcgcatggtagatagcaacctgcggcatggcgataccggcctggcgcgcttgcgttgctacggtgttcatcaaccagcgttctctttcattgcgaggctgttcaataacttcccctcctacggattttaacgccatccatttggacatcagcaatgaaataaaagaaccgccaaaaccaaacagcagcgccatgatcagcaagccttgcacgctgctcgactgtatccccgtcaggctcagaaccagcccgaaaacgaccatcacggccaggttcgtcagcaggaagagcgcgattcgcatcataattttcttttaacctcaatttaacaaagcgcactatgcgattacccacatcgtatgggtcttatggctattttcaagcatcaccaggcggtaagtcacgagaaaaacacaactttacattttgtagcattatcctgacgacttctgcgcttgttaaaaaaaaacaggcacaattttttgtgcctgtttagcgttacttattggctgccgcctgctccgctggtttttctttttcaagatgcgccaggtccagagcaatcttcaccgtttcatcaaggtatgggtccggctcctggtaatcctttggcagatcgtccagtttcttcagcaacggtttaccctcgcgtttaaaccgatcgttaatacgcgccagacgcagagcgtcttcttcattgttctctttctcacgctgcgcataattcagagagacgatgttgcgcttatccttcatggcattgaaacgtgcgatatccttcatgatgtactggaactcaggatctttggcgatacgcgcgttgtgttctttcaataattccgggccaaacggggccaaatcgtccgatttcacgtatttcgccgcatcaatgctatcccacggcaaggcgttatcttcaaatttttctccggtttccgtctcttcattgccagtcggcatgatgatatccggcgtgacccctttacgctgcgtactaccgccgttgacacggtaaaacttctgaatggtgtactgcaccgaacccagcgcaggccattccgggcgaagcatctgatcgtaaattcggtttagcgaacgatattgctgtaccgtacctttaccgaaggtcggctcaccgacaatcagcgcgcggccataatcctgcatcgcggcagcgaagatttccgatgccgaggcactgaaacgatcgaccagcaccaccagcgggcctttgtagtagaccacgccgtcggtgtcgctatcctcacgcactttaccgttattgtcgcgcacctgaactatcggaccagaagggataaacagaccggaaagcgaaacggcttccgtcagcgccccaccgccgtttgaacgcagatcgataacgatgctgttaacgttctgtttttccagcttctgaagctgaactttgacatcatcggtcaagccaacatagaagcctggaatatccagtacaccaactttttccttgccgacggttttcaccgacattttaaccgcgcgatcttcaagacgaatccgttcacgcgtcagcgtgataatacgcgttttcgtccctttgccagccggcagtatttccagtcgaaccttgctgcctttcggccctttgatcagcgccaccacatcgtcaagacgccagccaataacgtcgaccatcggttttccggcctgccctacgccgacgatacgatcgccgacgctaatcgacttgctcttcgctgccgggccgccggcaaccaatgagttaatgacagtataatcgtcatccatttgcagcaccgcgccgataccttccagagacaggctcatttcggtattaaactgctcggtattgcggggagaaagataattcgtatgcgggtcgatttcacgcgcaaaagcggtcatcgccagcgagaacacatcttcactgttggtctgcgccaggcgacgaatagcgaatttgtagcgacgcgtcagcgtttcgcgaatttctttgtcgctcttgccggtgagtttcaggctgagctcatcgaatttcactttaccatcccacagcgcatttagctcagcctcatctttcggccagggcgctttactgcggtccaggttaaacgtatcgtttccggtgaaatccattggccgttccagcacttttagcgcgtactggtaacgttcaaaccggcgcttttgcgccaggttataaagatcgtaaaaaacatccagcttacccgtgcgcagctcatcgcccaacacggttttctttttcgcaaactgctcgacatcgctcgccaacaaaacgttgtggctatagtcgagaagattcagatagcgatcaaaaatctttgccgaaaatgcctcatccagatcgaactggcgataatgggagcgggtaaaacgcgacgttacgcgctcgctcaccgtcgcatgttgcgtctcttcctttagtacgggaatttgatcggcacgcgtaatatcttccacggcgaaggactggcctgctaatgcaagcaggccagctaacgcggtaagcctaaaaaaagtgttcatgccaggcctggcctccgtttcagaacaccaggtgttctgcgcgtacaatcaaagacatacccgaattcagctgtacacggacaccatctttggtgatttctaatacggtggcatccatcgcattattacccgctttcaccttgagggactgccctacggtcaatactgaaatatcagaaaccggcgtgtgcttctcttcgcgaggcgcacgcggcgctttcgtcgtcggtttatcagcgcgaggtttacgttcagcgccttctttacgacgcgctaccgggcgaggtttacgctcgcgtcgcggcgcgtcttctttttcgccagccgccgcggcagcttcgcgttttttcgcttgctgctctgcgcgctgcgcctgaacacgggctttggcttcttcaagctgcttacgcgcatgttcgacatgctgttcttccagctcgccgcacggattgccatcaaggtcgacgcgcgttgcgcccggcttaacgccgtacaggtaacgccagcttgaagtataaagacgtaaagcggaacgaagttgcgttttgctgaggttcatttcgcccccaactcgctctaccagatcctgaaaaataccaattttcagcgggcgagcttcgccttccgcactaaaacagtgaggaaaacgctcggccagaaacgcgataacttctttactgctattcaacttaggttgattttccatgaaatttcctgattacaacggacgtagccaacaagcagcaggcatgaacaggcgtcattataatgacgccatcagtaattgctacgttatccgttgattatcctgcgacgctcgcaaagaattttttgtaatccgtcgttgcaagcacggtttcaagctgtgcgaccagcgtacgcaggccgtgttcatcttcttcggtaaaacggccaaacgccgtgctatctatatccagcacgccgataatccgttcgccaaccgtgacaggcagcacaatttcggcgttgctggcggcatcacaggcaatatggccgtcaaacgcatgaacatcatcaatacgttgaaccttattctgcgctaccgctgcgccacacacgccgcgaccaaccggaatccgcacacaggcgattcgcccctgaaacggccccaacaccagcgtatcgccttcgaggagataaaatcccgcccagttcacctcggtaaggcgttcgaacagtagcgcgctggtattcgccagcgtggccagaaagctggtttcacctgccattaacgactgaaaatcgcggtttaacgccgcgtatagttctgttttgctcattatataatcacttcgtggtcttactcctaaacacaggctattaaaataagcattaaatgcgttcttgctcaagattattcctgtcatgagttaagattacattattctaacactttgattcacgatacatggctctgaacacctcacacgtcacgccaacaaaaaagctaacgatcaggtcaattagcgaagcgctgccgcgcagccactaccagcgctgccctgaatgcgacatgctgttcagcttgccggagatgagcgctcatcaaagcgcttattgtcctcgttgccaggccaaaattcgcgatgggcgcgactggtcgctgacgcggctgaccgcgatggcggtaaccatgctgctattgatgccgtttgcctggagcgaaccgttactccatatctacctgttgggcgtacgcattgatgccaatgtgatgcacggcatctggcaaatgacgcagcagggcgatccgttaaccgccgcaatggtgctcttttgcgtggtgggcgcgccgcttattctggttttttcaattgcttacctgtggtttggcagccttctcggcatgaatctgcgtccagtcctgctgatgctggaaaaactgaaagagtgggtgatgctggacatctatctggtcggtattggcgttgcctctatcaaagtgcaggactatgcctttctgcagccgggcatcgggcttttagcgttcgtctcgttggtggttcttagcattctgactatgattcatctgaatgtggagcaactatgggaacgattttatccgcagcgccctgctcaacgtgcggacgaaagattgcgcgtctgtcttggctgccactttagcggctatccggatgcgaaaggacgctgcccgcgttgtcatattccgctacggttacgcagaaaacagagcatacagaaatgttgggcggccttgctggcgtctattgtctttttgctgccggcaaacctgctgcctatctcggtaatctacattaatggcgggcgtcaggaagatactatcctgtcgggcattatgtcgcttgccagcagcaatatcgccgtcgccgccgtcgtttttatcgccagtattttggtgccgtttaccaaagtcatcgtgatgtttacgctactgttgagtatccattttaaatgccaacagggactgcggacgcgaattctgttgctgcgtctggtgacatggataggccgctggtcgatgcttgatcttttcgttatctcgttaaccatgtctctgattaatcgcgatcagattctggcttttactatgggaccggctgcgttttatttcggcgcagcggtaattttgactattcttgcagtggaatggctggatagccgcttactttgggatgcacatgagtcaggaaacgcccgcttcgaagactgaagcgcaaattaaaaccaaacgccgtatttcacctttctggctgctaccgcttatcgcgctaatgatcgcggggtggctggtatgggatagctaccaggatcgcggcaatagcgtgactatcgattttatgtcggcggacggtatcgtaccgggccgtactcccgtgcgttatcagggagtagaagtcggcaccgtggaagatgtcagtctgagcaaagatctgcgcaaaattgaagttcgcgtcagtatcaaatcagatatggaagatgcgttgcgcgaagagacgcaattctggctggtgacgcccaaagcctcgctggcgggcgtttccggcctggatgcgttggtcggcgggaattacatcggtatgatgccaggtaaaggcaagcccagagatcatttcgtcgccctggatacacagcctaaataccggcttagcaacggcgatctgatgattcatctccatgcgccggatctcggttcgcttaatagcggttcactggtctatttccgtaaaatccctgtcggacgggtgtatgactattcgattaaccctaacaaacagggcgtgacgattgacgttctgattgagcgacggtttaccgatctggtgaaaaaaggcagccgtttttggaatgtctccggcattgacgccgatctaagcctgagcggcgcgaaggtgaaactggagagcctcgcggccctggtcaatggcgcgattgcgtttgactcaccggacaattccaaacccgccgcccaggatgacacgttcggcttatataaagatttagcccacagccaacgaggggtaatcgttaaacttgagctgcccagcggagacggtctgaaagcggaatctacgccgctaatgtaccagggactggaggtgggtgagctttctaaactgacgctcaaccctggcggtaaagtcaccggagagatgaccgtcgatcccagcgttgttccgctgatgcgggaaaatacgcgtattgagttacgcaatcccaaactgtcgctaagtgacgcgaatatcagttcgttgttaaccggaaaaaccttcgagctggtgccgggcgacggcgaaccgcgcagtgaatttgtggtggtgccgggtgaaaaagccctgctgcatgaggcgaatgccttaaccctgacgctgacggccccggaaagttacggcatcgaaccgggccagccgttaattttacatggcgtaaaaattggccaggtcattgagcgcaacttatccagtaaaggcgtgtcattcatcgtcgcgattgaaccgcagcaccgggatttggtacagggcgacagtaaattcgtggttaacagccgggtggatgtcaaagttggccttgacggcgtagagttcctcggcgccagcgccagcgagtggattgacggcggaattcgtattttacccggtacgagcgggaagatgaaatccacctacccgctctatgctaacctggaaaaagcgctggaaaatagcctcagtgacttaccgactaccaccttaacgctgacggccgaaacgttgccggatgtccaggcaggttccgtcgtgctgtatcgaaaatttgaagtaggcgaagtcatcaccgttcgcccacgcgccaatacctttgacatcgacctgcatattaagccggagtatcgccacctgttaaccagcaatagcgtgttctgggcggaaggcggcgcgaaagtgcaacttaacggcagcggcctaacggtacaggcctcgccactctcccgcgcgctgaaaggggccattagttttgataacctgagcggcgccagcgccagccggcgcaaaggcgataaacgcattctttatgcttcagaaacctccgcccgcgcggtaggcggacaaattacgctgcacgcgttcgacgccggaaaattggcggaagggatgcccattcgttacctcggtattgatatcggccagatccagacgctggaattgatcaccgcacgtaatgaagtgcaggcaaaagccgtactttatccggagtatgtacagacatttgcccgcgccgggacacgtttttccgttatcacgccacaaatttccgcggcgggcgtcgagcatctggatacgattctccagccctatattaacgttgagccaggacgcggcgcggcacggcgcgactttgaactgcaggaagccacgattaccgactcacgctatctggatgggttaagcatcgtcgtggaggcgccagaagcaggctcgcttaatattggtacacccgtcctgttccgcggtatcgaagtgggaaccgtcaccggaatgtccctggggtcgctctccgatcgggtgatgatcaccttgcgtatcagtaagcgttaccaatatctggtgcggaataactccgtattctggcttgcctccggctatagtctcgactttggtctgacaggcggcgtggtgaaaacggggacatttaatcagttcatccgtggcggtatcgccttcgctactccaccaggtacgccgctggcgccaaaagcgcaagccggtaagcatttcctgttacaagagagcgaaccgaaagagtggcgtgaatggggcaccgctctgccacgttaaacaccaggctccggcgtactcgcgccggagcgttttatgctacactgcgcgcctgtttttttgccggcgatacacctgtggctcaacacgctgtctattttcctgacgcttttctgacgcaaatgcgtgaagcaatgccttccacgctctcttttgatgaatttatttcggcctgccaacgcccgttgcgccgcagtatacgcatcaatacgcttaaaatatccgtggctgatttccttgccctaatcgcgccctacggctggtcgctcacgccaattccgtggtgtcatgaaggattctggatcgagcgcgatgatgaagaggcattgccgcttggcagtaccgctgagcatttaagcggcctgttttacattcaggaggccagttcgatgctgccggtcgcggccctgttcgccgatgataatcatccgcagcgggtcatggatatggcagcggcgcctggctccaaaaccacgcagatcgctgcccgcatggggaaccgcggcgccattctggccaacgaattttcggccagccgcgtcaaagttctgcacgctaatatcagccgatgtggaatcgccaataccgcactgacgcatttcgatggccgcgtatttggcgctgcgttaccggagatgtttgacgctatcctgctggatgcgccctgctctggcgaaggcgtagtacgtaaagatcctgatgcgctaaaaaactggtcgccagaaagcaatctggatatcgcggcgacacagcgggaactgctcgacagcgcttttcatgctttacgacccggcggcacgctggtctactccacctgcacgttaaatcgccaggaaaacgaagcggtctgcctctggctgaaagagacctacgccgacgccgttgaatttttgccgctgggtgatctgtttcctgacgctgaccgcgccctcaccccggaaggcttcctgcacgtcttcccgcaaatttacgactgcgaaggattcttcgtcgcacgtctgcgtaaaatgtcatcccttccagccatgcccgcgccggggtataaagtgggggcgtttccttttacccccctcaaaggccgcgaagcattacacgttacccaggcggccaacgccgtcggactgttatgggatgaaaatctccatctttggcagcgtgaaaaagaggtctggctgttcccggcagagattgaatcactgatcggaaaagtccgtttttcccggctcggcattaagctggccgaaagtcataataaaggctatcgctggcaacatgaggcgacgatagcccttgcctgcccgactcatgctcacgcgttcgaactttctgtgcaagaggcggaggagtggtatcgcggtcgggatatttatccgcaaacaccccctgccgctgatgatgtcctggtgacgttccagcatcagccacttggtctggcaaaacgtatcggcgccagaataaagaacagttacccgcgtgaactggtacgtgatggcaaactctttactggtaatagttaaaaggcgcacaaaaaaaccgcactttttgactggcgcttttgcctacgttgactacgctgaaaaatggacggctaaactggtcgtaccacaattagcgtattaacggagagcacgatgatgaaaaccagtgtgcgcattggcgcttttgaaatcgacgatgccgaattacatggcgaatcgccgggggagcgaacgttaacaatcccctgtaaatccgatccggatttatgtatgcaactggacgcctgggatgccgaaaccagcgttcccgccattctcaacggggaacattccgttttgttccgtactcattacgatcctaaatctgatgcctgggtcatgcgtcttgcctgactcaaaaagaacccgtcgccaggcgggttatttattcttccttttctcatttcccccctgcgctaacctctcctacactatcgtgtaaagtagttaacattgaggatgtaatgttcgcgctggtactttttgtatgttacctggatggaggatgcgaggatattgtcgtggacatctacgataccgagcagcattgtctttattcgatggacgatcaacggattcgccatggcggctgttttccggtagaggattttatcgacggcttctggcgacctgcgcagcaatatagcgatttttaaccctggtcgctgataccgctattgtatccgcgctaacgtcaattgcccgccaaataccgcgcccgtatcaatatagtgtacgttggcaaaatccatgcgccgacgcaacggcgtatggccaaaccaaaaatgatcggctccgctaatcccgccgcgcttatttatgagccgttcgcggctccagagaacctgatgtaagtcgacctttttttgccattgataggttgacgcgggataatctgcatgagcgatcacatgcgtgctatggcggcaacgaacttccagtatccagggcagccgctgacaaagaataaaaagcgcttcagcttgcgcagcgtgttcagccgtcaggcgggtaaaccagtcgccaccattcatcaaccacagcgtcgactgcgatgaggcccgcgcatccagcgccatttgttcatgattgccgcgaaccgccgtcatccaggactcacgcagtaaagccaggcagcccaggctgtccgggcctctatcaatgagatcgcccacagaaactaacaagtcttgttgcggatcaaatcgacactcacgtaaccttttcattaacattgaaaaacagccgtgaatatcgccaaccacccagacatgccgccaattctttgcctctattcgctgataaatctcttcaggccgcatcatgtttttcctgtcgttcattatccaggacagatataaaaagatagcgtgtgcagatttttttgcttagtaagcgtgcgctgttgtaaatagcgaatttcaccattagcgagtaaatgctttgttatcatcgcaataaaatataactggctgcgccaggggagggttatcccctggcgcagcgagctactcactatcgcctgttcaccttcaatactcttcctccttaaaaacatatcggaaacataaaccacatcgcctcagcacacgatatagcacactctttagcggagtgatcctcaaggcaaaccagcgccaatgcaggtgtcgttaccgtggcgaccatcgcccccacaaacaggcgcagcacaattttttttaaaggcggcataacctctcctgacagttaacagaccattaatccttatcgagacatcatccgtgcgcgggtatcatagacttaacaacacgcagcgttacaaaaaaagctgtctggttgtgcaggtatttagagtaataacaattattttaagttttaaggttatccatttgatttttatattaaaataaagatgacgacgttttgttaaaagcgtcgccataaaaacgaatatatagtttcagaaaatctgctattaattcatatggttaatagcagtattgtatttactaccatcaggaggcattctgaagatacttattcgcaatattttctatagttaactgaaattgttgtggcgttggcatcgtccccttattaaacagcggcgtaacctctttcataacgattttctcagcatacgctttaaaagatacctgctgattatgatttataaacatatgcggatatttaatactcgcggaagcaatgagggggacgacaaaaggattcgcccctgccccacctggagtaaatacgccattttttatctccccaggtagccccgcattctgcgcagcctctcctatctctttcaaaaagggggtaatactgacccctttactgatgagtaatttacaacattgatctttattattactgtacacggctgataatatggcttcgcatgtctgacgagcataggccggatctttactcgcattacctttgatatccagactattgagcttttgcagcataaaatctttaacagttttactggttaataccgccctaccctcagaagcgttcccacgatgaaaatgggtagtcggtatgtctgtttgttgatgcaggctaaaacgatctgacagactcgtcgacaggctgataaagctatttctaacggcagtaatactttttgcaaaaatgtccttctccgttgttttttcttttactggttcaacgtcacttctatggattctgtagtgctgggtggatagtgttatgttagtcacggtagttctccttttagataactatgcatagctacactttgtttatatttcttgctttcaaaaaatagccaccttctccacaaccatttttactcattgatatttataaattttattttcctgatggattttgttcttctgtcacttagcctgttttttttcggcgcaaggtgatcgacttttatcgaggaacatttttatcgggacaatcctgaacaggtaaaacatcacttcaattcaactactgcgtcacataaaacattcatgaatattattatttatgctgatgttgttacgattttgcccccattcgcaggctggctaccaattatcctgccagcgagttagccgctttttcaaaacctataaagtcgccacgccaaacctctccgtcactgtaatccttatctaaacatcaattaattaactgatttttatatattatgacttttcatgacgttcagaaaaactacaaatgaaatggattgacgcatctattagtggtcaaaaaaacgcgctacgagaaataatcagtaacaattgcaacactattccaatcataacgtaaactatatgataccaggtgattattattgcttttaggtaacatatctgtatggctgcttttaagcaacaatactctaacacaacatataacattataacttacaataggttaacaaatggaattacagcttatgcttaaccactttttcgagcgcgtcagaaaggatgcaaatttcaacgcatttctaatcgatctggaatataataatatcgcttattacatctattttgttgctaccggcaatgtgaaaattatcactcatgcaggccacttcatttctattaaaagcaatagaaagctgattaaagtcaattcaacaccgaatacgcaattaataaaattgatttcagctaaacacttttcgggggagcattcctatgaaaaatactgtactgatctggcaacggcaggcgtttttaaatggattgttgaattaaaccaaaaaactcgacaatactggtcgaaagacaaccaattattatatatagaaaatgtggtcatgccgctttaacaagccagggtaataatagcgtcagtcgtgacatccggcgtgttacgactgcgggttatccaatttagagaccataatgagagtctgactgcgagagttaccctgtgcagtccgaccgacgcagcaacgtttgacacgattctcgacaacagcatctcctggtgcaggagaaatgatattcaaagcgatatcgactaaaagctcaaaatatttgccttctatttatattctatctaattaataccctccaggaagtgtggcataattgcagaatctgtcaggattccgggagcataccggagcgtaatcgaaaaaacatctggagatgtatgagcaaggatgaaatcagttatcaaattctttaccggtactctctggaaaagctatacagtactcttgccagaagagtagataacgtgctgtcattcgccctcgtttttctcggggtcggcgtcaccataaacgtcgggagtccctttattctggggccaggcattgtgggtatcgccatactaaaaagagtactccgcttcggcacgcgatcagcacaggccgaccggcagtcccgcgcctggctgaaactttttaatactcagcaccgctttccttcagataaaacactgttccttgccttcacatcgcttgagcaagacgcgagtgaagtatggtccatgcttattggtcctgccatcgtcatgactgagaccgccctcggaaaaacgcccattgagccattgacggcgggtgaaaaactctgtgcatttttgagcggcgcgacgaaatcccagctagcagatcgcaattgaactgtcttctaaacgcctgcgccataccacagagatttagtataaaattaattaatggagtactaacgctgtcagcaggtttctctgagtgaaagattcgtattatacgcacagcccagtttacagtttatataacagcgctatatgtttttgtatccgtaccatgccgcctacaagcggctgtctgagtacctctagccgtgccagggggtattagctcaaatgtgagctgacatatctatggcacagcgccaaacctaatctgactgtccgccctgtgccagaagcggacgctgatcatggtgtgtacaggccaacaatacgatatattttaaagctacctgattacagctttcataaagctatgggtattcaaatgcagcaaagctataaaccgggcttaattaaataatgcctttgcgaacctactttaggaaagtccggtagcgacatttgaagtatatacccctgtttttcataaaaagggagagcctggaagctaaaggtatctacaagtccatgaacacagcctttccgcaaaccttctttttcggccatcgccataagtttgctccccagaccgcagttccttgcagattcacttacccaaagatagtcgatgcagagccacggaccttttctgtcagcaattaatccgcctaccatttcgccgctttcgtttctgcagtagaccccaagctgcccatttttactaaaatcgacgaactgagcattgtagcttcttaatccggttaatagttcttctttatcaaattcagtaacttgatgtgtgatttgaatgtccatacatgcccaattgaacaagtttgtatttggaatataacgttataaataagttaattaaatgtatcaatagaaagtttgtttttactcctgggggcaggtcacgtccgctactcgcttaaagcaaactgtcagttggagtctgagctggtacaattaatgtgccactggttagaaatcagtaatacgattttatcaggctggtgctctggcctgtcaggatttgaggtatccacccggtttaccagccccctgtatttggcaccagtggaacccacttcccgatccaggatatccagtacccaccaccgaacctctttccccaaaagacatgagcaacctcaagcgccttgtctggatgataaccacggtatgaagtttgataacacgtggaatcagggcgtatggttcgctctccgttcagcaactggacgcccttctccccagcctttcagcgttgaagatttgccagcgctgggtgaagagtataggcgaattatgaaaatcatttctgccgtttatacttcgaaaaagacgttatcaaaaaggtggttcgcaagcgcggagttattaaacctttacttaacgaaatacggtttaagttgcttgaattgcagcagaaagaaaacgacggcttgctgatgctggacaaattaagcaagcatggcatcaatggactgatacgccgtcaataaaaggaagggtgcatggacgatcccgtcacatcaccaatcacaacagaagagcacaaaacaacatttcacagtgtaaaggataaaacacgatgccattttcaatcaaaaacatatgttcaggtccaaaaggacattgcccagaaatctccagccctatacaggacaagccagtaccgaggaattgcacactgacctcaacaacatgcgatatacagagctatacagtattcagcagatggtcctgcagttatgaaatgcgcccacccggtgcagaagaaagaaccccacgactaaaattctcagcaacggagctctcatggctatctaaaacaatagaaacagagaggcgcaacacaaaagaatgagcctgtcagtaattctgtgtaactgcccagttattaaaggtgatcgctcaggcggtcaccgaactcgataataaaacggctcatcgccagccgccagttctggatcggcatactccattttttgacgcatccttgatcgccagataaataacttttcgtactgagtcatccgtcgggaacaccttgcgtttcttaatcgcggcacggatcacgcagttcagggattagattgcgtttgtggtgtagatggccttgcggatatccggcggataactgaagagcgtattgaggttttcccagtgcgcacgccagcttttgctgatttgcggatatttatcgtcccgggctttcgcgaacgcatccatcgccatcagtgccgcctcttcggtcggagcctgaggccgctggtggcgactttgtagcctttccaggctacgtatttcagactgttacgcaccatatggataatgcacagctggatatggggctgcgggaagacgctgtttatcgcatccgggaaacccttcagaccatccacacaggcaatcaggatgtcctgaacgccccgggttttcagctccgtcagcacgcttagccagaacttttcgccttcattttcggccagccacatacccagtaactctttctggccttcggtgttgatacccagtgccaggaagacggctttgttgattacgctgccattctgacggactttgacgacaatgcagtccatataaacaatggggtacagcgcatccggttgccggttttgcctctcagtgacctgctcttttacggcgtcggtgactttagatatcagcgagggtgacacattggcgtcgtacatctctttgaaggtggcgacgatttcgcgggtagtcatgcctttggcgtagagggataaaatttggctgtccatctgcgtaatgcgcgtctggtgcttcttaagcagctgtggttcgaaggtgttttcacggtcacgcggtgtgttgagttctatctcgccgtcatcgcacaacaccgttttggacgagtagccattacgggtgtttgagcctgttttgggcgcatttttctcatacccggggtggtcagccagctccgcattgagcaccgtttcgacggttaatttcgccagcatacgggaaaacgaattgaggtcggcttcggttttaaggcctttagccagttcaaccgcaagggctttgagtttcttttcgtccataattgcctgtctccgttactggagtgaacatatcaaagacaggcaattacacaattttacttacagtctcagttcagtcacattattgatgagcgactgtacgttaagcaaatcaagaccgggatgaaaatcgctctgccactttcgctcaaccttccttccatgggtttacgcctcagtacggtgattgagcgttgccgcctggtaagccgtagcgaataccttatcagcgctggcatacgcaaaaacagcccgaacgggagtattcatcctaatagcctgactaaaaaatttgttgcggcacgaaaattgaccggaataaatttcagtgaaaacccaccgccgtttcacgagatccgcagcttatccggacgactgtataaagacgcttacggcgaagggtttgctcagaaactcctgggacatacttcagagaacaccacgaaactctatctcgatgaacgcgataataaagcttacgtgatgctctgattttgctgtaaaagaaatgttaaactggatttggatctgatataacgaaaaagcccggaatacagaaattctggaaaatttcggaaatttcggaaatttcggattattgatcataagcaactgatttataagaaaaaaagagaccgaatacgattcccgcttacggcaaccattgatatttctctttaaattcataatgttacatattaattaagtgattttaacgattggaatatgttatttttgattctaatagattcaattagttatcactttttacgttttaattcggacatatttcgggccattttgcgtataaatcccccgaccaaacaaattaactgcccaatacatcactcccctcttccattgggggactcccgatgccaaatacccatgtagacgaaggcttaatagtgatgccaacaaaagcgatcgcgaaaagttgaacaggtggctagtttcagattaaacacattggttagtcatcttgaacaagtaaaatccgccgcaactggcaaccattcaatactcgcactatcgaacgatcgccagcttgccgcagcccgttcttgcatacgatgtggctgcggttccatcacatcaggaatgtgaaaatcgggataaacctgccacttaacctgaagcaggtcttcatagcgggtggtataccgaggcgaaagcatttctcttaaggtcgccatataaaaacattctattacaacgagttatctcctcctgcctccgccccggcgcaaagctatagttttttctatctccttgtgaaacaaacaattattcttgctatggcgctgattaacaatcgttcgcgggcaacgtacattcagcgagtttcagagcttcctgacggaattcagccggtgctgtttctggggcttcttactggttgatacagatcctgcctcttacttgagaatttactcatttagccgtatgtccattatgggtggataagatcatttatcatcgtaagggttgaaagcgataagttaaacttgtcctggctcaacaagggacccgactaatgatgagctcttcatcttcaaggcgttttatgccttccagcaagaatagacattaaatcgacaactgctgccaggtcttacaggcgcagtggacaatcgtgtggtaacagcctgagtcatttattatttttctcattcagcataactgcgtcttctgatagagaaatttttatctaaacatataaaaaacacagtgaagaaaacgctacttttttctagctaaaaagctaaattaatttttttacggagaggatcttatgcgcaaggtgtcgatatctatattattcatgctagtttcactgacttgggggactacatggttggccatgcgaattgccgttgaaactatccctccagtgtttgcaaccggaatgaggtttatgtttgcagcaccttttttaatcatcattgcatggttaagaaaaaaaacactgttgtttcctcccggacaacgattattccagtttgtgatatgcatcttttatttttgcattcctttctcactaatgatttatggtgaaacctatgtcaactctgggcttgccgccattatctttgcgaatatgcctgtggccgttttgatagcatcggttttgtttctaaatgaaaaagcgaaactaatgcagatcgcgggcttaactatcgcaatcactgcattgacggggatacttcttgaagaaacgaatacaagtacagagagtcactggcagggtatcactgcgcttatttctgctgtgttaatccatgccataatatatacacaatgtaagaaaagaagttgtactgtctctgttatcacatttaatgcgctcccgtgccttttagctgggttgatactttctgcgacaggatggttttttgaaagaccacaagtatcaaccttctcagtacactcaatattagctaccctgtatctcggggcttttgccggagtttttggtatcctgtgctactttgcgcttcagcaaaaggctaatgccttccaggcttcgcttgtatttcttatctttccgctgattgcggtaagtctggaagactatatttatggatatgctatttcaacacactcaatgctgcttattataccattagttatcgggatatttcttactcttgtcgccagaaatctccctgtaaccagcagatgccgggataactcatcacagaaataatcgatttataataacgcaaataattcctgatgccttactgagctccggctaatgcggggtggataagctggaatacagacccggtaatacacagcgattatattaacaagcaatgtaataaaggagttttttatgttcatgtttctgccattcttgcttgcactgagcgtggcaatgggggccataaacagaaaggataaagtcagctacattctgtgggccgttttactcatcgtcactattttatcattcattcatcatatgaccaattcgctgactttgtcattttaaggagtgtgtatgaaaacgcatcatcatccaacaacatttgttcatctgattaatcaggtgggactccttgggatatgcgttgctctggttgtagccttttattatcaactcgtcaggcatgagctgccttgtccaatttgcttattacagcgggctggcctcatcatcgccggttttggctttttatttaacctctgctttggtctacgaggtatacattacgggatggtaattattggcagtatcctgaccggagttatggcatcccggcaaatatgtttgcatatcatgcccggtgacacaggatatggttctgcattttttggattacacttttatacctggactctgattacgtcaattctgattattattgctgttgcggtaattctggcaatcagtagcatgaatgttgcatttcgttcattgaatattaatccggacctgttcagtattgtcggttgggtatttctgttactgattactgccaaccttatttcaactgtactggaatgtggcggaggggaatgtgctgctaacccggtcacatataagctactgtcgaaacaggatattgcctttctgaaaacaggcctcctgacgaggacagttctccggttatgacgcacttttaaaatgactgattggtaaatatatagcaagcacctgtcttgtagaaattggaatggttatgggctaacacggaagttacagtaacattgaaatgttgcaataacaggaatcaaacttacaaccttcgcattacgaattagtagaatcacatttaactaactgtttcaaatacacatttccgcattcacattgctcaactcaatggcacatgatgttagaaatagaatgatgcttcaccatgtttgacacaaaaatggcacaccctataaagcatccacagcacatatttgggtggcacgcaccgtggaaatactgcattaccctaacacagggaattttctgtacagcgtcgacagccccgcatcataaataatcgctacctgctgtcgcggtactcctgccctaataaggcaccctgcctgcgcccattgctccggcgtcagttttggcctacggccaccaatgtagtggcactgtagtggcacactgggtactgaagcaatggccacaactggcgcttgatgctatcagccagataaccttccagatggataacaaacatagcagctatcctgtctgtatcggaattgtaaaaccagacgttgaccatcttcatcaaggttaaaggaacaaagagctctttaaagtaactctttgttccattacgatagtttaaatatgatgttctgaatgggccttcactacatgaacaggaaaggctcaggataaccacttctcagacattaaaagcaaatgagaaaaccaagggggcctaaacctgccgccagggaacaaacctttgcacagtctgcagtgctaccaccgtcccctatgcaccccagggcgaacgctggctgggcagcagacgacaacagcagaagagttgttatgaataaaactttacgtgatttaataagagaaaacatattattaccctcatagtaagcagtattaaataagccgggatatatctgatgttcaatcagtccctcatatagggttagcaccatagcgagtcgttttcacaaaaaacacagactgttgaaactttatttatcactttgacatttgcaatacatgacacatgattagcttcagccgccattatagggaaagctccatttccatactcatttactcacttctccctgcggaaaaagaaatgcagtatagccagcgtggtgcttttgctgaaaccaggcgcgagcaacacggcaatgatgatcggcgtcagaatgagttcggaatcggcattggcaaacaaggcgcacagtcgttaatacccaccagcagttccgccaagagtgcgacaatgtcgtaagagaggccttcagccaggcaaaacagcgctacggtgcgccccggcttgctgaggaagtgaacctggggcctgaggtacaatgtaaaaacgatagcgtccagcctgtgccatcagggtctgcggcgatctcagtccggaacaatttgaaaaccagaacctcgcttaaggctgtgtccacaatacgcggacaggatcaaaactgttagtgtggctggcttacaagaatgaagtgaagttgattgatataacaaacactcctgataatgttaactggcctgttcctccgggggagcgagccagccatgatttgaaaagcacatgaaatcactttcacatgaattaatttacattggaaataaaatataatagtgcttatcatttttatttaagttaaatattttataaatggtttttatttactcacctgatggtaatgaataacgtttaatatctatagtaaaggatgctgtaaccgtaaggatagtgtgccacaatttaacaggtaacatattatgaaacacgtcaagagcgtatttttagcaatggttttaatattaccatcttcactatatcctgctcttacaatagcggcagactctcaagatcataaaaaagaagaaacaattaagccaatgcctcaaaagtggtgtaatctttggcctgctggcatacccttccctgaagattggtttaaaatgtgtagaggttattgagtataaatttaatatactagccagtaaccatatcagttatgacagacaggccttcttcatatttgctataaataaggcctgagctttcctgacaaattataaactactggctggtttctccggccagacaggctttaaagtatcaacacggtttacctgtacccggtactttctccatgccagaagagaagctttttctttattggttgcttcgtccagatccactgcatcctgtaacggcgcgattttttcagacgctatttgcaggagtctgtttttcgttccttcagcttcacgaagtctggctgcggcctccgcagcttcatcattcatccagacctgagccttactatcccattttttgtatccaccacctggtgaaactgatgtgacgttttcaggtagcggaccaagatcggagatataaacctgattgccggttgttgtgtcgtaaaccgtctcgccgcggtgatcctcctgcagactccacgtttgggtttcagcgtcaaaaacagcaatatgactggagggaatatcaggaggggctatatcagtacaatttgccgggcgacgctgtccgggggggacctgaccacatccggcccccattgcaggtaatgcaacagatgtaattttccggtcttctccggcgcttttattgtgctgaaaaattgccagtaacgcagcccgtgttgcattataaaccgcgtcggtgccgtcaataatcagcggaacgcgcatcgtcggggcgggaaccagccacggatgtttactgttacccgtttcaataacaaaggcggtgccgacgggctgttcccccaggtattcacggatgatattttgctgtacccgttcctgtaattgcgacccgaaatatgccgtaatagcagcatccacaccgccgtccataagaccaaaggtttccgcattaccgtctgcgtccacaataacgacgtgtccgtgtggaccgatatacatggtgtgctcgtgtcctccgatataaactgtatgcgcatggtcgccagcggcctgtgtccacgcaccacctcctagctgaaatgaagtgtgattggaatctccccagtatgaattgatataaccgccgaactggttagtatgattgcccgtggtattaacgccccttttcggagtcaaaccagttcttacgctcttttggagtcattttattcgggtcctgatgttcagcagcctgggaaacgggcgtttccatcagtacgcggatcacatccgtcaggagatacagcttgtttttttcattgcttcccagtgccaggggaacgcccgagaggcgactgacaaccgtctgtcgatgtaaccctgtaatagcggcaagctgactgatattgcatttgaggttcttcagttcgccgtccatttttacctctggggctgtttcttagcgcgccctcccccggaaaaacaaaatataatgaacaaaaaacatacaaaccatcatcttttaaaaataaattacattaaaacagagagttacaacatgatgatgatgcatgaaaaatcaaaaatgcgccaaatcccgcgccgctgccgccccgtggcaggccgccccgccgggagtacctttttaaaatgcgaacaattatcaacaactaccacttaatgattatttatttcattttgcgatattgattatcattttcaataacaacacacagagaacataaatgaaaaatatcatcactattatcgtagccattattatcgttttttatgcaggtatgtggtcgcagaaattcctgatggaagatgagtgccttgattcaggtggttcatacaatgaaaatggaatttgcaatattgcaggcagtcatcaggatgttccccctaagtaagcagaatgctttttaaattcgttacccacctctacagataaggaggcgaatggtcactaaaagtaaaatccattgcagaagaatttccggaaagttgttattccagcaccccgacaggttattcagacagatttcagctatatcaaaactgagtgagtacttatcagtttcatctggtgaaaaacctgttcttattcatctggttccatctgatgatatgtagtcacttttttacagcaatattacagggggagtttcaatgcctcctgtaattatttgactctctcaccgaatcatatactcgttcacacgtcattcctgcccggtagcgctcgtcagcgattccagcataatgtttagctgcttctgcaatatctccgagcatgttggcaagcattctggcgtcggcgttggttgttttgcttctgacggcagcggcaagatttgcggtgtgctttgcggcgtccaggcgggtggcaagtttttttgcttcggtacgcagctggctaacagtggcagacaggccagcagcagtggcagcagatttagcggcttgcgcttgtgcatctttcacagcctcatcacgggcaataacgcggccctgttcaataatacgggcggcggtctgggcgttgacttcctgagaggattcagcgctgtcgcgatctgcccattttttttgccagcccctgtcactccagacattaccggcgataaacgcaccagccatcagcaaaataaacaccagctgcaaccagtatcttttcagaagagcagataacagattcataccagcaccgattttgctttctcaaagcgctcccgccgatcaccgatgccgttctaccctccgttgatgatctgcgtaacacgtaccaggtcgccggaatatttcagacaccctttagtcacaaaaagccacgctgcggatcgggcagcatgacgttctagctcaagctgtcctggattcgccactagatccagtttcagtgcaacgccacatctggtgtaattctccagcccggtaatcctgatcttcgccgaacgtggtgcgaaagctttcttgccgttcatggcgttcgcgatccggactggtacgaatatgtgcctgataacaccccaacaacccatgaagaaaatgcagcaaggcttagtcaggcgggcaaatgtctgcgggatattgaggcagggagatttcagtgtgatgaagaaaaacagcaaccgacaggcgaactggcagatgaaccagcaacgcctgaagcagtggaacaggacacaactgaacatcatccggacccacagccgctggagaatgaaccacctgtaagccagacagaagcaggctaccagaaaatacgggcagaactgcacgaagcacgtaaaaacattccacccaaaaacccggttgatgttggtaaacaactggcagccgcgcgcggtgaatatgtcgaaggcatcagtgacccgaacgatccgaggtgggttcataacaattacagcgcctcaaatcagggtgaaaaagaagaagtggtgccggagggaaaacaaccagcagcagagccggaggctgtcaccagaaacgcggacgggactttcgatgtatcagcgctattcctgcccccctcaaaccagaccgaaaaaacggaagccagaacagaaagagatggagaaacgccgaaagagagcaaccagcaggaaacggctggcgatacaggacaggaaattacaacggacggtggatcaggtacaacttcatagcgcaaaaccacacgccagtggcgcttattgaaaaactaaaaggaacggactcattcactgtgtccgcatggattgatcgctatgaggttttattacagcgccggaatctgtcggttaatacctacaagattcgcagtaatcaattagcgaccgtacgcgaaaaaatgggagaaataatactggcagaagtaacaacccggcacattgccaagtttcttgagtcgtggataaccgagggaaaaaacactatggcgggagcaatgagatcagttctatctgacatgttcagagaggctattgtcgaagggcatattgtgaaaaacccggtggaagcaacccggataccagagattaaggtggccagggaacgcctgcaactggaaacgtataacgccacacgagcggcagcagagcatatgcctgcatggttccctctcgcgatggatttagcgctcgttactggtcaacgtagggaggatatcgtaaatatgaaatttagtgatgtttttgacaaccgcttatacgtcactcagattaaaaccggaatgaaaatagccattcccctctccctgacacttcgggcgacggggttacgtctgggaacggtaatcgatcgctgccgacttgtaagccgcactgatttcatgatcagtgccggaatcaggaaaaatagcccgaccgggaatattcatccggatggattgacaaagacatttgtaaaagcaagaaaagcctccggtgttaacttcagcaataatccaccgacatttcacgagatccgaagtctggccgggcggctgtacaaaaacgagcacggcgaggtgttcgcccaaaaactcctgggccacacatcagagaacaccacgaaactctatctcgatgaacgcgataataaagcttacgtgatgctctgattttgttgtaaaagaaatgttaaactggatttggatgtgatataaccaaaaagaccggaatacagaaattcgaggaaatttcgaggaatttcgaggggaaacacataacccattgatttataatctaaataaaaagagaccgaatacgattcctgtattcggtccagggaaatggctcttgggagagagccgtgcgctaaaagttggcattaatgcaggctaaatcgccttgccctttaagaatagatgacgacgccaggttttccagtttgcgacgaaggtgattgaaaaaacctggcgttttgtctgttatcagagataaaaaaaccgtaagccttttcgtgaaggtttacggttttttattaaaaatcagtcagctattggatggatcacaaagcttttgcgcacgttcgataaacggcgccagactcattttctcaccgggcttcgccgggttatcgatttgaatgacggcaataggctgagcgcgcgttttaccctccgctacttgctgttcggcaatggcattcaagggatactgcaccagcgtactggggttgatcacatagagcgcctggccaggccgacaggtcaacatgacctcttcccgattaaacgcccacttgtcttttcctacttcaaaacgacttacggtaatcacctgcggcgccgccaacgctacgcccgaagtggccagcagaagcgccggaaggagtatttttttcattcgttatgccagtccatcaaaaaggttcgagggttgcaaacaggctgacgatcgccagaactatgcctccaactccccattcaatttgcgtcatcctgacaaaccataggtcagtccggggattttcctgtcgcatacgtggtacgagaacataccgattcgtcagcgcaattgctaccataagcacgaccagcgcacattttaacaaaagcaactgtccataggtggtctgccagatagcggtaaatcccgtgataaatagcgtgttgccaatgcctgtgagcaatacgcccgccacaaaaaagtgaccataacgagaaaaacgcatcatggcgctaatagcatgttgacgccagcgtccctgagccatgcgcatacaataaaccactggcaacagcccgccaaaccaggctgcggcacagagtaaatgcagagcatggttaatctgctgtaatgttcccgctacaccgtcgcgcatcgtcgcatgtccaacgcctgccagcaggataaactgagcaacggttagaataagaagccgtcgttgcatttttaccggcgcaatgactaccaccgccagcgtgaccagcgcgaggataatttgccatatccagaccgcgccaaagcgggtttgcagtaccgcgccccacaccgagacgaaaaaaacatcgggccagccgccgcccatcagtccgccctgaaccgccagcatgaaagccgcgctgataacgctccaggcggcggcatgttgttgcagatgtaaaaatcgacgcgtcattaaacgacgaattgatgcgggtgccagccaggcaccgtaaagcgcgcagccgtagaccagcatcacactagcaaaatgaataaatcggagagttatccagacgaatgtcagcatcatttatttcacgctgaaggtgtatttcccttttgttttatgtccatccaccgacacaacgtgccagtctaccgtgtaagcgccagattttaacggctgctcaagcgggataatcaactgcgttttatcctgttcatttcgctttgccgggcgcgttttgatgagctcttgctgagggccagtaatggttgcgccgctgaaccctggctcaatcccttcagaaaagttcagggtcagcgcctgtggcgaggccgtaacggcagcattcgccgctggatactgatgcgtcaggtgcgcatgtgcccaggccgctggcgtcgcaaatgtcgatgccagcagcagtaaagctaaacgtcgcgatggtgcagaagaagccatattcactattcctttttgttatacctacgttacaaagaataaccttcaacaatcaatgagtcgaggatcatcatttccatcttgccattaccgcggactcttagtaccttctggcggcaacaaaaaaggagacacgtatgaaaacaaatctggctcagcttgaacaagcggaaatggataaagtcaatgtggacctggcggcagccggggtggcatttaaagagcgctacaatatgccagttgtcgcggaggcggtcgaacgtgagcagccagagcatctacgcgcctggtttcgcgagcggctgattgcccatcgtctggcttccgtatcactatcccgactcccttacgaacccaaagttaaataaaaattatataacgttacacttccttacatgcagacgactacattataaggcgattcttaacctatgctttttagaatggctgtagagactatgaaaaggaagtcattatgtcctcctggaaaattgctgctgcgcagtatgcgcccctgaacgcctcgccggcggagcatgtcgcccatcatctggaatatattgagcttgcggctcgtcaacagtgcgaactgctggtctttccgtcactgtcgctattaggctgcgacgaaaggaataaatcgttgcccgccccgcctgacgaggcgcttttacagccgctcactcatgcggccgatacccaccatatgactatcattgtgggtatgcctgttgagcataactgccgcttcgtaaaaggcatcgctatttttgccccatggctaacgtcgccgctcatgtttcacaaaagtcatggcgcctgtattgccaggcagcgaagcgctatcaacgtggtggatgagcagccagaaggtggtgatatagatccctcatttacgttattcacaaccagtcaatgtcttaacgaacctgaactccatgcttctacctcacgcttacaacgtttttcgcataaatatgcgctggccgtactgatggccaatgcctgtggaagtagcgctctgtggaatgaaagcgggcaacttattgttcgtgccgattgcggttcgctattactgacgggcctgcgcacaacggagggttggcaaggcgatatcattccattacgctaaggtctttcggtgaggaatgaatcatgttgcggattatagacacggaaacctgcgggctgcagggcgggatcgtagagatagcctctgttgatgtcattgatggcaacattgtcaatcccatgagtcacctgatacgccccgatcgccctattacgccgcaggcgatggcgatacaccgtattaccgaagccatggtcgccgataagccgtggattgaagatgtcataccgctttattacggtagtgagtggtatgtcgctcacaatgccagtttcgacagacgcgtattacctgaattgccgggtgagtggatctgtaccatgaagttgtcgcgacgcctgtggccgggaataaaatacagcaatatggcgctctataaatcgcgcaaactaagcgtacaaacgccgccggggctgcaccatcaccgggcgctttatgattgctatatcaccgccgccttgctgattgatattatgcgaaccaccggctggaccgcggaagagatggtcaatattacgggccgtcctgcgctgttaaccactttcccgttcggtaaataccgcggtaaggcggtatctgaagtcgcaaaacgcgatccgggctatttacgctggctttttaataaccttgataatatgagcccggagcttcgcctgacgcttaaacactacctggaagatgttcaggctggcgagcaacgcagcaatggaacaccacaataacccgcgacgctcacaagccgttgcgggcgcgcgtctatgcgctatgtaaggttccctgcgccaggccgattaaaaaggcgaactccagcgcgacgccttcgtaggatttaaaccgccccgacttaccaccgtgcccggagtccatatccgtacataacagcagcagacgttggtccgtttttagctcgcgtaattttgccacccacttcgccggttcccagtattgcacctgggagtcgtgcaatcctgtcgtcaccagcaggtgcggatagtcctgcgctttgacattgtcataaggactatagcttttcatatagtcataatactcaatatcctgcgggttcccccactcttcaaactctcctgtcgttagtgggatcgactcatccagcatcgtggttaatacatcaacaaagggtacctgggcaataacgccgtggaaaagctcggggcgttcgttgatagcgacgcccattagcattccgcccgcgctcccgcccatcccataacacagcgacggcgaaccgtaacccagttttaataaggcatcgcaggcatcaagatagtcattaaaagtattccgctttttgaggaacttgccatcttcataccactgctgccccagctcaccgccgccgcgaacgtgtacgattgcgtaaacaaagccacgatccagcaagctcagtcggctgctgctgaagtcggcgtcaatactggaaccgtaagatccgtaaccgtaaaccagaagcggattttgccctttacgaaaatacttctgatgataaaccagcgataccggcacttcgacgccgtcgcgtgcggtgatccacaggtgttcgctctgataacagccagaatcaaacccaggcacttccgtctgtttaagtacccgtcgttctccggtatccatatccagttcaaacaaggtatctggcgtcgtcattgaagaatagccgtaacgcagccgggaggtctcaggttcgggattataggcaagccacgtcacgtaagccggatcgtcaaaggcgatgcctatcacttcacgggttttacggttaatttgccgcaggctggtaagcccccgttgacgctcttcgaccactaaccagtcggtaaacagggtaaacccttccagcataatatgctcgcgcggagggatcagctcttcccaggcgttttcattgcgcacgcgggtacggtacaacccaaagtttttaccgttccggttagaacgcaggtaaaacttatgttgatagtgatcgagactatattcatggtctttgcggcgcggtaaaaatgaaaacggctcggcatcggccagttccgcgtcaagtaatagcacttcgctagtggtggcgctggcaaggtgaatcaccacataatgctgcgaagtggttttatgcaggctgacataaaaggtatcgtctttctcctcatataccagttcatcttgcgatgacggagtgccaatcgtgtgccgccaaacctgatagggcagcagcgtcttcttatgcttacgcacatagtaaagggtcagggaatcattggcccagacaaattcaggcgcaacgttatccagcagttccggataccagttaccgctttcgaggttacgaaaacgcaacccatactgacgacgggataaataatcttctgccagcgccatgatggtattatccggcgtaatggcaagtccaccgagcgtataaaattcgctgtgcgcggcccgctggttcgcatcgagcaaggtttcccacacatcccactcttcgcttaacgccgattgtcgttgatagatggcatattcgcagccgggttcatagatataacggtagcgatagccatttttcacatacggagcggaaacttctctgggcgggatgcgatcgataatttcttttagaatgcggtcctgtaacgcctgctgagaggtcatgaccttccggccatactcattttcctgatgcaggtaatcaaggacttccggctgcgagcgagtgtcatctcgcagccagtaataattatcaatgcgcgtatcgccatgtacggtcatggcatagggaattcgattggcttttggcaacatgtcgttttttcttttgcgttaatatttgttatatatcacgcggcaaacacagcggcgtagcatggtagtcccggtcgctcacctcggtaagcgcctgagatgtcactgcttcgccgctatcttgcaacatgaatgacgtaaactatccatcctataagggtggcaaaagacacgcatgatgcaagcgaaacatgttacttaatggcaggttatcagcctggtagcgcctgtttttgctgctgcaagtcctgctcgataccgtcccgaacctcctgaggaatttttagcgcgtctcctaacgcattcagatagctacgttccataaagtggtcaatatcaatggcggcgcagctcaggaagtagatttccagggcttcttcttcattgcgaatgccctgtgccagacgttgtggatcaagcggctgctcaatagctttttcgataaacacacgcccttgctcttcaacacctgattctcgcagttggtgctcaatcgccgcgcgttctttggcatcaatatgcccatcgctttttgcagcaaaaaccagcgccaggatcagtcgctcagtgcgaacatccagcggcgtactttggctgccgaattgcggctccccctgatgcgcggcgcgtactttatctttgtacttattccacaatacggaacccgccaccgcgccgccgcccaccagcaaagcgccagtaccgtatttggttaataatttgcgcgaagacttattggcgaccaacagtccagccagaccgcccagcgcgccgggaaccagcagtttatttaacccctgttcaccggaaggcgatgcggaagcgcctttttgcccaagaagtgattgtaattggttcaaccagttagccatagtacccctcaaatacagaccaataatggtcaagcgtacctgaggggatgtcaggaattgtctgttccggcaaaagaagcgcaaattacgctgctagcggggcttatattccgccttgccggctttgcaatcaacgatgacctgataatgaatatcggcgcttttaccgcgaacagttagcggaactgtccatttatcattttgacccacaacgtcctgcacattaacccacgcgaccgggtcagcctgcccgacctttttttggtcgtcggcccaccgcacgatacgattttgctggtagtcgcgcttcacgcttgccgcaatcccggcggcatccagcccttcgcactgcggaaacttaaccgatttactctcggtggatgccgcaaatgccgatacgctggcggataaaaacagcaggctcaacaacgctcctcttttattcatacttttctccttagcacaatgattcaggaaaagcatggtacaaaacgccgggagcgcaagtgtgggttcaggcggcttgctttttcgttttactcgcggcgtccttttcaaccgcctgcggagaaggcaacttaccggttttgaggatagtgcttaacacctctttatgttccgccagccacagcgacaacgcttcgcgctgcccatcttccagcacgactggcgactgctcaagccaggtatcaagaagatcggcagtatcgagcattttgtcccaggcgtcggcttcctttttactggtaaatgacatcttctcctcaccctcgcgaatgactacgtatttaacttcaaccgccattttgcagccccttatttacctgtgtttatatacagtatattgcaaggcagcaagaaaagcaatttattcgaaaagacatacgcaaacgttttcgtatatactgcgcgcaggtaaataaggggacagaaatatgacgctattaggcactgcgctgcgtccggcagcaacgcgagtgatgttattaggggcaggagaattaggaaaagaggtggcgattgaatgccaacgcctggggatcgaggttatcgccgtcgatcgctatcctgatgctcccgccatgcatgtggctcaccgttcacacgtcattaatatgctggacggcgaggcgctacgtcatgtgattacagaggaaaaaccgcattatatcgtgccggaaatagaagcgatcgccaccgatacgctgcgcgagctggagggcgaagggctgaatgtcgtgccttgcgcccgtgcaacgcagctcacgatgaaccgcgaagggatccgtcgcctggccgcagaagaattaggactgccgacatcgacgtatcgctttgccgacagtgaggccagttttcatgatgcggtagccgcagtgggttttccttgcatcgtcaaaccggtcatgagctcttccggcaaaggccagagctttatccgctcggccgaacagctcgcgcaggcatgggagtatgctcaacagggcggacgcgctggcgcgggtcgcgtgattgtggaaggcgtggttaaatttgattttgaaattacgctgctcaccgttagcgccgtcgatggcgtgcatttctgcgcgccggtcggtcatcgtcagcaagatggtgactatcgcgaatcctggcagccacagcagatgagcgaactggcgctgaagcgggcgcaagagattgctcgtcatgtggtactggcgttaggcggtcatggcctgttcggcgttgaactcttcgtctgtggcgatgaagtcattttcagcgaagtctcccctcgcccgcacgataccggaatggtcacgttgatttctcaggatctctctgagtttgcgctgcatgtgcgcgcctttctgggaatgcccgtaggcgctattcgccagtatggtcccgctgcctcggccgtgattctgccgcagcttaccagtcaaaatgtgacgtttgataatgtacacgcggcggtaggagccggagtgcaggtacggctgtttggtaagcctgagatcgacggcacccgtcgtcttggtgtagcgttagcgacaggtgaaaacgttgaagaagcggtgataagagcgaaaaaggccgtcagccgcgtgacggtaaaaggctaatgcgccatcgcctgatggcgacgttagcgcatttttatcagacctgcctgatcgccactcgtaagcccgataagcaagcgccatcgggcatttaacggcttactgcttcgcgccttctaccgcttcgcgcgccagtttggtgatgcgatcgtaatcacccgcttccagcgcgtcggccggcaccagccaggaaccgccgatgcacaacacgcttttcagcgccagatagtcacgatagtttgccggagagatgccgccagttgggcagaaacgtacctgagagaacggaccggcaatcgcctgcaacgctttagtgccgccattcgcttccgccgggaagaatttgaactctttcagaccatagtccatgcccaacatcagttcagaaacggtgctaataccgggaatcaatgggatagtgcctgccgtcgcggctttcagcagtggctcagtcagtcccgggctaatcgcaaattgcgcgcccgcttccgtcacctccgccaactgctgcggattgagaacggttccggcgccgacaatcgcttccggcacttctttagcgatagcgcgaatagcatccatcgcgcaggccgtacgtaaagtcacttccagaacgcgaacgcccccggccaccagcgctttagccatcggcaccgcgtgctccagtttattgactacaatgaccgggacaaccgggccggtggtcaggattgcttctgcacttgttttccagtttttcatcggaattcttctctcgcctgattactagtgtgtcatcttaaaaagtgatacaggttgcgccctgctccgcacccgacagcttttcgcgcagcgcgccaaacaactcacgccccgttccgacgcgcgacgcgctcaggtccggaatatgaggctgacgagcggcaagttccgcctcgtcgaccagcagagttaactcacctgtctgcccattcacgcgaatgatgtcgccatcgcgcacttttgccagtaagccgccatcgtaggcttccggcgttacgtggatagctgaaggcactttacccgaagcgcctgaaagtcgtccatcagtaactaacgcgattttgaaacggcggtccaataatacaccaagtggcggcatgagtttatgtaattctggcattccattcgcttttggtccctgatgacgcacgacaacgacacaatcccggtcaagcaggcccgcgtcaaacgcaggcagcacatcatgctgactttcaaataccatggcaggcgcttcaatgatctggttttcaaccggtaccgcagacgtcttcattactgcgcgccccagattaccgcttagcaccttagtaccgccgtgaggagagaacggcttatcaaaagaggcaatgacatcgttatccagtgacctttccgcgccttcacgccagtccagctcgccgttgttgagccagggctccagcgtatagcgtttcaggccgaagcctgcgacagtattaacgtcttcgtgcagcaatccggcattgagcagctcacgcatcaataccggtacgccgcccgccgcctggaagtggttaatgtccgccggaccgttcggatacagacgcgccatcaacggaaccacttccgacaaatccgagaagtcatcccagttgatcagaatgcccgccgcgcgcgccattgcaaccagatgcatggtgtggttggtggagccgccggtagccagcagcgcgacaatgccgttcaccacgactttttcgtcgatcattttaccgagcggcatccacgtattgccgttgccggtaagacgtgttacctgacgtgcggcagcggcagtcaatgcctcgcgcagcggcgcatccggatgcacaaacgaagaacccggcaactgcattcccataaactccaccaccatctggttggtgttggcggtgccgtaaaatgtacaggtgcccggcgcatggtaagaggcggcttccgactccagcagcgccattctgtctacttttccttccgcatatagctgacgaatacggactttttctttattcggcaggccgctcgccatcgggcctgacggaacaaaaatcgcgggtaaatgaccaaaagagagcgcggccatcgccagccccggaacgattttgtcgcatacgccgaggaataacgcgccgtcaaacatattgtgagagaggcctactgctgccgacatcgctatcacttcgcggctgagtaatgacaactccatgccatcctgcccttgcgtaacgccatcgcacattgccggtacgccgcctgcgacctgacctaccgcattcacggaatgcagggcctgacgaataatctgcggataatgttcatacggttgatgcgcagagagcatgtcattgtaggaggtaataatggcgatattattgcgcaacatacttttcagcgaggctttgtcctctggctgacaggcagcgaagccatgcgccaggttgccgcaggccagttgagatcggtggaccgtggcggttttcgcctgctcaatgcgggcaagataggcttctcgggtctgctgcgagcgttcgacaatacgctgtgttacgcgtaacaaattaggattcatagaggctcctgaaatttatctgtccggctaccgggtttaccatgcgtttcatcaatgtggaaagacagtgaaatacatgatgtccggtgataatggggcaaaatcgtttcaggcagtgtaataaaaaaagcctcgcaggtgaatccacacgaggcttaaaagtgcaaaaatgattctacaatctgtgttagatcatgttaccggtaaaataccacctaagagtgagtggcaaatttactcaaactcattccacgaacgaccgtcacgggtaatcatcgccacggacgctaccggtccccaggtgcccgcctgatacggcttcggcgcgtcgttgtccatcgcccatgcttcggtaatggagtccacccacttccaggcttcttccacttcgtcacggcggacaaacagcgcctgaatgccacgcatcgtttccagcagcaggcgttcataggcatccgccaggtgcgtctgattaaaggtctcggagtagctcagatcaagcttcgtgatctgcagattatgcttatgatccagccccggtactttgttaagcacctgaatatctacgccttcatccggctgcaggcgaatcgtcaatttgttctgcggcaggtcttgccaggactctttaaagaggttcagttcaggcgtcttgaaataaaccacgacttcagagcacttggttggcagacgcttgccggtgcgcagatagaatggcacgcccgcccaacgccagttatcgatgtcgacgcggatcgcgacgaatgtttcggtgttgctgcttttattcgcgccctcttcttccagatagcccggcaccttttgcccctgcgcaaagcccgcggtgtattgaccacgaaccgttttttcacgcacgttggagcgatcaatccggcgcagcgatttcaacactttgactttttcatcgcgaatactgtcggcgctcaggtcagacggcggtgacatggcaatcatgcagagaatttgcagcaagtggttctggatcatatcgcgcatctgaccggcctggtcaaagtatccccagcgcccttcaatccccacctcttccgctacggtaatctcaacgtgatcgatagtgcggttatcccagttattaacgaataacgagttggcaaaacgcagcgccagcaggttgagaaccgtttctttacccagatagtggtcgatacgatatacctggcactcttcaaagtattcgccgacccgatcgttaatctcacgcgaggtcgccagcgaagtacccaacggtttttccatcacgacgcgcgccggtttggcgttgagtttagcctctcctaaccctttgcaaatagcgccaaaggtgctgggcggcatcgcaaaatagttaatggtggtgcggtttttttgatccagcatatcgcccaggcgactaaacgcaggcgtatcgttaacgtcaagattacaaaaatccagacggccgctcagcgtatcccacaagccttcatcaattttttccttcatgaaggtttccagcgcttcacgcacaacgtgggtataggcttctttatcccagtccgcgcgccccaccccaatgatacgggtatccggatggatctggccggctttctcaagctgatacagggaaggcagcaatttccggcgcgccaggtcgcctttcgcgccgaaaatgaccaggtcacatgcctgggctgtttgcgttaccgccatgtcattctccttagttaatctcctggtactttagccaggatatcgttgtaattttattacacagcactgtactgcttttacgagattacggaaaccgtaaacgccttttcatggatgaaccggcgtttgattggcaatataatcggcaaaacgcctaataaaattgtcgcttttccacacaagctggaacttaaaatccgacgtcggtcatgtaatgaaaaaaaacgacaccttttttagccattttgcccccttcggcagtcgccaggagtaatatctaacaaaacgcgctcggtttcgcgcatcattgaaatcgctaatacccatgagccttgctaatcatgaatatgctggaaaaagtccagtctcaactggaacatttaagcaaatctgaacgaaaagtcgccgatgttattctggccgccccaggcagatcgattcacttaagcattgccatgctggcccaggaagctaacgttagcgagccaacggtgaaccgtttctgtcgcagcatgaatacccgcggctttcctgattttaaactgcatctggcgcaaagtctggcaaatggcaccccctatgttaatcgcaatgtggatgaagatgacagcgtcgaggcctatacagggaaaatcttcgagtccgctatggccagtctcgaccatgttcgccagtcgctggataaatcggccgtcaaccgcgccgtcgatttactgacccaggcaaaaaaaatcgccttttttggtcttggttcctccgccgcggtcgcgcatgacgccatgaataagttttttcgcttcaatgtaccggtgatttactccgacgatatcgtgctgcaacggatgagctgtatgaattgtagcgatgatgacgtcgtcgtgctcatttcgcatactggcagaaccaagagcctggtggaactggcgcagttggcgcgggaaaacgatgcgatggtgatcgccctgacctccgctggaacgccgctggcgcgcgaagccacgctggccattaccctcgacgtaccggaagatacagacatttatatgcccatggtctctcgacttgctcagctgaccgtgatagatgtgctggcaacgggatttactttgcgtcgcggggcaaaattcagagataacttgaagcgtgtcaaggaagcgctcaaggaatcgcgttttgataaagaattactcatcaagagtgatgaccgctaaaagcaataacaatgttctacccttttcgtcatccggggacgttcattttataccgttaaggtttcagaacgaccggatcaatgttcacgcaacaccaagttgttttagtcaacggagtattacatgtccagaaggcttcgcagaaccaaaatcgttaccacgttaggcccggcaactgaccgcgataacaaccttgagaaggttatcgccgcgggcgcaaacgtagtacgtatgaacttctctcacggctcgccggaagatcataaaatgcgtgctgataaagtccgtgagattgccgccaaactggggcgtcatgtggctattttaggcgacctgcaagggccaaaaattcgcgtttccacttttaaagaaggcaaagtgttcctcaacatcggggacaaatttctgttagacgctaacctgggtaaaggcgaaggcgacaaagaaaaagtcggcattgattacaaagggttgccggcagacgtcgttcctggcgatatcctgctgcttgacgatggtcgagtgcagttgaaagtgcttgaagtccagggcatgaaagtctttaccgaggtcaccgtcggcggcccgctgtctaacaataaaggcattaacaagctcggcggcgggctttctgctgaagcgctgaccgaaaaagacaaagccgatattcaaaccgctgcgctgataggtgttgactatctggccgtctccttcccgcgctgcggcgaagatctgaactatgcacgccgcctggcgcgcgacgccggctgcgacgcgaaaattgtggctaaggtcgaacgcgccgaagcggtatgcgaccaaaacgccatggacgatatcattctggcctctgacgttgtgatggtcgcacgtggcgatctgggcgttgaaatcggcgatccggagctggttggtatccagaaagcgctgattcgccgtgcgcgtcagctaaaccgcgcagtcatcaccgcaacgcaaatgatggagtcgatgatcaccaacccgatgccgacccgtgcggaagtgatggacgtggcgaacgccgtcctggatggcacggatgcggttatgctgtctgccgaaaccgcagccggtcagtatccttctgaaaccgttgccgcaatggcgcgcgtctgcctgggcgcagaaaaaatccccagcatcaatgtgtctaaacaccgtctcgacgtgcagttcgacaacgttgaagaagccattgccatgtctgcgatgtatgcggcaaaccatctgaaaggcgttaccgcgatcatcaccatgacggaatccggtcgtaccgcgctaatgacttcccgtatcagctccggcctgccgattttcgccatgtcgcgccatgaacgcacgctgaacctgaccgcgctctatcgcggagtaacgccggtgcattttgatagcgcggctgatggcgttgtcgcggcacatgaagctgttaatctgctgcgcgataaagggtatctggtttccggcgacctggttatcgtgacccagggcgatgtcatgagcaccgtcggttcaaccaataccacgcgtattttgaccgttgagtaaaactcccccacgcctgttcatcaggtagtacagggtttgtcagcataaagcctctcttacgagaggctttatttatttgatgggataaagatctttacgcttatacggctgaatctcgcctggcttgcgggttttgagcagcttcaggatccaggtgtactgttccggatgcgggccgacaaaaatttcgacctcttcgttcatccgtctggcgatagtgtggtcgtcagccgtgagcagatcgtccattggcgggcgaatctggatagtcaggcgatgcgttttaccattatacaccgggaaaagcggtatcacgcgtgcgcggcacactttcatcagccgaccaattgcaggcagcgtcgctttgtatgtcgcaaagaaatcaacgaattcactatgctccgggccgtgatcctggtccggcaggtagtaaccccagtagccctgacgaacagactgaataaagggtttaatcccgtcattacgcgcatgcaaacgtccgccgaaacgccgacgcactgtgttccagatatagtcaaaaaccggattaccctgattatgaaacatcgccgccattttttgcccctgagaggccatcagcatggctggaatgtcgacgccccagccatgcggtacgagaaaaatgactttttcgtcgttacgacgcatctcctcgataatctccagaccttcccagtcaacacgctgttgaatttttttcggaccgcgcatcgccaactcagccatcatcgccattgcctgtggcgcggtggcgaacatctcatcgacaatcgcttcgcgctcagcttcgctacgctgcggaaagcacaacgacagattaattagcgcccggcgacgagaactcttccccagccgtccggcaaaacgccccagcgtcgccagcaaagggtcgcggaatgatgccggtgttaatgcgatccccgccattgccgccgcgcccaaccaggcgccccaatactgtggatagcgaaaggatttttcgaattcagggatatactcactattattttttttggtttccatgcttttccagggtctgctgacgcgaaaaggaattgtgaatagtgtagcgacgtctgcgtctcacacaaaacaaaaaagccggcacacatcgcgtaccggctctgtcagcgcatttgttaatcgaagcgcagttgcggcagaacctctttcacctgtgccaggtattcacgacgatctgaccccgtcagaccttccgtgcgcggcaattttgctgtcagagggttaacggcttgctggttgatccatacctcataatgcagatgcggccctgtggaacgcccggtgttaccagaaagcgcaatacgatcgccacgtttcactttttgccccggtttcaccagcagcttacgcaagtgcatgtaacgtgtggtgtaggtgcgtccatgacgaatcgcaatgtagtaaccggcagcgccgctacgtttagcgaccacgacctcgccatcccccaccgacagcaccggcgtaccctgcggcatcgcaaagtcaacgccacgatgcggcgcaacgcgtccggtaaccgggttcagacgacgcggattgaagttggaggagatgcggaactgtttagcggtcgggaagcgtaaaaagcctttcgccagaccaaccccattacggtcatagaatttaccgtcagcggcgcgaatggcgtagtaatctttaccatcggaacgcatccgcacgcccaacaactgactctgttcacgcttgccatccagcatctcgcgcgacatcagaaccgaaaattcatcgccctttttcagcttgcgaaaatccatctgccactgcatggcttttatcactgcgctgatttcgctgctggttaaaccggcctctttcgcgctggcgacaaagctaccccctaccgtacctttcagcagactgttgacccagtccccctgctgcatttcactgctcattttaaaaccgttggcagtgcgatcgtaggtacgcgtttcacggcgggagacttcccatgtcagacgctgtaaatcgccatcagcggtcagtgtccaggaaagctgttggccaattttcagattgcgcagctccttatcagaagcggcaagtcggctaatatcgctcatatcgatgccgtactgattcagaatgctgcttaacgtatcgcctgtggagacgacgtattcatggacgccgacttcgcctgcggttttatcgtccagctcatcctgaggaatagcttcatcttcctgcgcggcctgatcgatgggttcgctggcctccggtaagagggaacgaatctcgcttttctccagttcaatagttttaacgattggcgcggattctgggtggtaaacatagggccgccatacggcgacggccagtgtcagaacggtaagtgaccccagcataacgcggtggggtcggggcagattattaaatgccagggcgacagagcgggctatctgttgcacgtattcacttcctcgttaatctcctttcaggcagctcgcatactggttggctaattggcttaaaaacgctgaatagcttgttttacccagtttaatgttcgtcccgagggggtccagtgttcccattcgaacggatgtccctctcgccacggcttccacgaccgctggcctgaattgtggctcagcaaaaacgcaggttgctttttgctcaaccaactgtgttcttatttcatgtaaacgctgcgcgccaggttgtatctcagggttcacggtaaagtgaccgagcggggtgagtccgtagtgtttttcgtagtaaccgtaggcgtcatgaaaaacgaaataccctttccccttgagcggcgcgagctcgttaccgacctgtttatcggttgcggctaattgtgcctcaaaatccttcaggttggcgtcgagtttggctcgactttgcggcataagttccactaatttttcatggattgcaaccgctgtagcccgcgctatctctggggagagccaaagatgcatgttatattcgccgtgatggtgatgtacgtcacctttttcctcatcggcgcccgtatgcgcatgttcatcctcatcatcatccgcgcccttcatgagtaacggttttacatcggcaagttgcgcaatggtaacctgcttattatcagggatattcctgaccgacttctccataaaggcttccatttccgggccaacccagacgactaagtccgcgccctgtaagcgttttacgtctgatggacgcaatgaataatcatgctcggaagccccatccggaagtaatacttgcgtatccgtaacgccatcagcaatggcggaagcgatgaacccaagcggtttaagcgaagcgacaacggcggcgtcggcagcctgggttgcactcccccaaagcgcggcggataatgctgcgaaaagaagcgtatttttctgtaacataatgcgactaatcatcgtaatgaatgtgtgaaatgtgatattataacattctatcacttctgcaagcctaaaattaacatgacaagtttagtttcactggaaaacgtctcggtctcatttggtcaacgccgcgtcctctctgacgtgtcgcttgaattgagccccggaaaaattttaacgcttctcggccctaacggcgcggggaagtcaacgcttgtacgcgtggttttaggactggtagcccctgatgaaggggtgatcaagcacaacgggcaactccgtatcggctatgtcccgcaaaagctctatctcgataccacgcttccgctgacggtaaaccgatttttacgtttacgtcccggcacgcaaaaaacggatattctcccggcgcttaaacgcgttcaggccggacatttgattgacgcgcccatgcaaaaactctccggcggtgagacacagcgcgtactgctggcgcgtgctctgcttaacaggcctcagttgctggtacttgatgagccgacgcaaggcgtggatgtcaacggccaggtcgcgttatacgaccttatcgatcagctgcgtcgcgaactcgattgcgccgtgctgatggtgtcacatgacctacatctggtcatggcaaagacggatgaagtgttatgcctgaaccatcatatttgctgttccggcgcgccggaagtggtgtctatgcatccggaatttatctctatgtttggcccgcgaggcgcggagcaattagggatttatcgccatcatcataatcatcgccacgatttacagggtcgtattgtactgcgccggggaaatggtcactcatgattgaattattactgcccggctggctggccgggatgatgctggcctgcgccgctggtcctttgggctcatttgtggtctggcgtcggatgtcctattttggcgatacgctggctcacgcgtcgcttctgggcgtggcgtttggcctgttgctggacgttaaccccttttatgcggtaatcgccgttacgctgctgctggccgccggtctggtatggctggagaaacgccctcacctcgcgattgataccttactgggcattatggcgcacagcgccttatctttaggactggtcgtggtcagcctgatgtccaacgtccgcgttgatttaatggcttatctgtttggcgatttgctggccgtcacgccggaagatcttatctcgatcgctattggggtcgttattgtgctggccattctcttctggcagtggcgcaacttgctgtcaatgactatcagtccggatcttgcctttgtcgatggcgtgaagttacagcgcgtgaagctgctattgatgctggtaacggcgttaactattggcgtggcgatgaagtttgtcggagcgctgatcattacgtcgctgctgattatccccgccgcaaccgcgcgtcgctttgcccgtacgccggagcagatggcgggcgtcgccgttggtgtaggtatgatagcggttacaggtggactgaccttctcagccttttatgataccccggcagggccatccgtagtgctgtgtgccgcgctgctgtttatcttcagtatgatgaaaaagcaggcaagctaagcgtgtgttgcccggtggcgctgcgcttaccgggcctacaaaatcgcccaggtctgatgagcgcagcgacttcaggcgctaaggcatctctggcggcgtgatcccgaaatggttccaggcgcgcaccgttgccatacgcccacgcggcgtacgctgcaaaaagccttgctgaatcagatacggctccagcacatcctcaatggtttcacgctcttcgccaatcgccgccgccaggttatccagtcccaccggaccaccgaagaatttatcaataaccgccagcagcagcttgcgatccatatagtcaaacccttccgcatcgacgttcagcatatccagcgcctgcgcggcaatttccgctgaaatagccccgtcatgcttcacctcagcaaaatcacgcacacgtctgagcagacggttggctatacgcggcgtaccgcgcgcccgacgcgccacttccagcgcgccgtcatcgctcatctcaagccccatgtgccttgcgctgcgcccaacgatgtgctgcagatcgggcacctggtagaactccaggcgctgcacaataccaaaacggtcacgtagcggggacgttaacgacccggcgcgcgtcgtcgcgccaatgagcgtaaacggcggcagatcgatcttaattgaacgtgcggcaggcccttcgccaatcataatatccaactggtaatcttccatcgccggatagagtacctcttccaccaccggtgaaagccggtgaatctcatcaataaacagcacatcatgcggttcaagattggtgagcatagccgccagatcgcctgctttttccagcaccgggccggacgtggttcggagattgacgcccatttcattggcaacgatattcgccagagtcgttttacctaaccctggcgggccgaaaatcagcaagtgatctagtgcgtcgccacgccgttttgccgcctgaataaagatctccatctgggagcgcacctgcggttggccgacatattccgccaataacttcgggcgaatggcgcgatcggcgacgtcttctgcgatcgtggcgcctgctgaaatcaggcgatctgcttctatcatcctttacctcataacgcggcgcgtaacgcgtcgcgaatcagtgtttcactgcttgcatccggacgggcgatcttgcttaccatccgactggcttcttgcggtttataacccagcgccaccagcgcagcaactgcttcttgttctgcatcttccgaggttgggctggccggcgacgtcaataccagatcgaccgctggcgtaaagagatcgccatgtagccctttaaagcggtctttcatttcgacaatcaatcgttcggcagttttcttgccgatacccggcagcttcaccagcgcaccaagctcttcgcgctcaaccgcattgacgaactgttgcgccgacatgccggagaggatcgccagcgccagcttaggcccgacgccattcgttttaattagctctttaaatagcgtgcgctcttgcttattgttaaatccgtacagcaactgcgcatcttcacgcaccacgaagtgggtgaagacgattgcctcctgcccggcctccggcagctcgtaaaagcaggtcataggcatatgtacttcatagcctacgccccctgtctccagcagcacgatcgggggttgtttttcgagaataatgcctctgagtctgcctatcacatgacgctcctgcgtaaagggctgaaaagataatgcactatcataaaaaaagactggatgtttatccagatgaaaaacacgttattcgcctatctcaatggccttcccttcgaatcggtcgcgcaacaccaccgggtgccgccgcgccccatgatgtggagatataataagtgtctataataaatataattcaataacattttctgtaagaataataaataaaaagtccagatacgcattatcactatagcttgaatttcctccggtgaaagcacatcctttataaacatttttaatcatcttgttatttaatcattcaggacagaaattcaatgttattgaaaaatattgtcataggtgcattaatggctattcctgcgctggcgtcagctaatagcctcacggaaacacgggaaagaatggccattgagcaacaagctatcgcctatactgtcagccaaaagtgggacaagctggacgctatgtttcaggaatacaataccggattcccgacaaccagcggcggaactcataaactggttatcgcatggggagggatctataatctttttcagtagatgtttccgacaatggtatttctggcgtggcaaaagagtggcttaaagcaaaccccaaatccacgggtgcaaggctgctgcaagcaatggtttttgatgctaaagccgtgaatttacgcggtgaaggtgcggccagcacggtggactctgatatatggccgaaatataaaaagctgatgattcaggaaaaagagtatctgttaaagaacaaagatattgccgacaaagatgtgacctggtatcaggaaatggaaatggtcgcacgcaatcttgaggataaagagctgctctatagcactttggaagaagccagcaaaaaatatcccgcctatcaaaatatttatatcgaggccatggttgctcgtttgcctaaatggggtggttctccggaagaagtcgaaaaaatcgccagaatggccgcagaaaaaaacaaagatcaatcgggactttcttactacgcttatatctggagtaatgcaatccattaccaacctgaattaatggctttactgaataaacgtcagattgtctcctgggacgatatgctgcaaggttggagagatcgctacaaacagttcccatcaacccgcacgcttaataatattctgataagctcctgcattgcccgcgataaagactcctttgtgaaagcagataaaatgattcaaggggaaacggagcgggatacctggccacaagggttaaattatcgggaatgccagcagtccttccaataattgccagattaccatcacagtttaatgcacagcattaattgaattaagccgcctctgccgttatatgcagaggtggtttaatgggaaatgtccttcaacctctggaccatgaacgagataaacggtaccgttgttaatcacttccttaccctttacaagaataataatcagcgattgatgaacagtacagactcgatatttttttgcattgcaacctaaccttttgcactttcgcctcctgttccccctggcgcttaatataacgcagagtcagccaaatatttgcgccaaccactcttgccagatcacacctcaaatgcctattaaaaacaaaagcaataagcatgaagagaaacacaaccagacaataacatagactcaaaaaaatatatggcgatacaaacaattatataatattgaaaggacagtccacttattccctgcgttcgtctatcttccctttcactttcacctctggaaagagataaaaacattatcaccgtaaattataatattcatgatggatatttattgataataatatcttgtcattatgtgagtataatgctaattatccaatagcgtaaaataaaggatattattttaggtaataatggaacgtgaacatgaaaaaacattattctgtccaatatgaaaccggggatatcgtctttacctgtataggtgccgcgcttttcggccagatatccaccgcttcacagtgctggagcaaccatgttgggattattattggtcataatggtgatgactatctggtggcggaaagtcgcgtccccctctcaaccgtcaccacgctgtcactgtttatacaacgttcagccggacaacgttacgcggttcgtcgcctgtgcggcggcctgacggtcgaacagaaactcgccatcatggaacaggttcccgcccggctgaataagttttatcacacggggtttaaatatgagtcatcgcgccagttctgctcgaaatttgtgtttgatatctataaagaagcattgtgtattccggtaggcgatattgagacattcgaagaattgcttcacagcaatcctgatgcgaaactcgccttctggaagttctggtttttaggttcaatcccgtgggatcgtaagacggtgacgcccgccagcctgtggcatcatcccaatttagaattaattagcgcctgtggaattgaaacccctcaacgcgaggctgagggagaatgatttagcgcaaccttccccgcgccagattgagtcggctctcgctcatttgcatcgcgttctggctaacatggcaatgcgtaatggcgatagccagcgcatccgcggcatcggcctgcgggttagcggggagctttagcaacgtacgaaccatatgctgtacctggcttttttccgcgctaccaataccgacgacggtttgcttcacctgacgcgccgcgtattcaaacacgggcagttcctgattgaccgcggcgacaatcgcgacgccgcgcgcctgtcccagcttgagggctgaatcggcgttcttcgccataaacacttgttcgatagcaaaatagtccggctggaactgcgtgatgatttccgtcacgcctgcgtatatgagcttcaaacgagacggcaaatcatcgactttggtgcgaatacatccgctgcccagataggtcagttgtctgcctacctggcggataacgccataaccggtaatgcgcgagccggggtcaataccgagaataatcgacacgctataccccctgcccgccggcgtttaacagcaccattacagggtcgccgccacctcatcagagatctcaccgttatggtagacttcctggacatcgtcacagtcttccagcatatcgatcagacgtagcagtttcggcgcggtttccgcatccatatccgctttggttgacgggatcatggacacttcggcgctgtccgctttcagacccgccgcttccagcgcgtcacgcactttgcccatctcttcccaggcagtgtaaacatcaatcgcgccatcatcataggtcacaacatcttccgcgccagcttccagagcagcttccatgatggtgtcttcatcgcctttctcaaaggagatgacccctttcttactgaacaggtacgccactgagccatcggtacccagattaccaccgcacttgctgaaagcatgacgcacttccgctacggtacggttacggttgtcactcagacactcaatcataatggccgtgccgccaggaccataaccttcatagatgatggtttccatgttcgagtcttcatcaccacccacaccgcgagcgatggcacggttcagagtgtcgcgggtcatgttattggccagcgctttatctacagccgcgcgcagacgcgggttggcatccggatcgccgccgcccaatttagctgccgttaccagttcacgaataattttagtgaagattttaccgcgcttggcatcctgcgcagctttacgatgtctggtgttggcccatttactatgacctgccataaatatttcctcaaaaaaagcgcgccttttcaggcgacgttaatgacaaactcttcaatcgcttgccggttactccaggacttggtaagcgccgccgcgtcaggcgcatcaagccactggtacgtcagatgttcagtgaatatcacctgccgctcatgcggtaacgcaaggcagaaccagaattctgtattgtgcataacgcccggcgcatagcgatgacgtaaatgtgaaaaaatttcaaactccaccgtacgttggcagtcgattaaggtcagttgctctgccgcaacatcaatcgtgacctcctctttgacttcacgcacggcggcctgcaacgcggtctccccttcttctatgctgccagtcactgactgccaaaaatccgggtcgtcgcgtcgctgcaacattagcacccgtttcgtatcctgcgcgaaaataaccaccaggaccgaaacggggcgcttgtacactttatccttcacgcgacctcgttgttggctgttgggtgacgccgcgcattgatgaggctcccccttgcgggccgccgcgatatcacgcgaatgatgtcgtgtacattgttcatatcagttattctcggctttcttcacaacctgaatacccaactccgtcaacgctgccaggttggcgaaactcggcgcttcggtcatcagacacgcggcggcggtcgttttcgggaaggcgataacatcacgaatattgtcggtgccggtcaacagcatggtcagacggtccagaccaaacgccaggcccgcgtgcggcggcgtaccgtatttcaacgcatccaacaggaagccgaacttctcgcgctgctcctgctcattgataccgagaataccaaatacggtttgctgcatttcaccgttgtgaatacgcaccgaaccgccgcccacttcatagccgttaatcaccatatcgtaagcgttagcgacggctccttccggcgcagttttcagttcagacgccgtcatgtcacgcggggcggtgaacggatggtgcatcgcggtcagaccgccttcgccgtcgtcttcgaacatcgggaagtcaatcacccacagcggcgcccatttgtcttcgtcggtcaggctcaggtctttgcccagtttcagacgcagcgcgcccagcgcatcggcaaccactttgttgttatctgcgccgaagaagatcatgtcgccgtcctgcgcgccggtacgttcaaggatagcctcgacgatgtcggcggtcaggaacttggccaccggactgttaatcccgtccagacctttcgcgcgctcgttaactttgatatacgccagtcctttcgcgccgtagatcttaacaaagttaccgtaatcgtcgatctgcttacggctaagctgtgcgccgccaggcacacgcagcgctgccacgcggcctttcggatcgttagccgggcccgcgaagaccgcgaactctaccgatttcagcaggtcagcgacatctaccagttccatcgggttacgcaggtctggtttgtcggaaccgtaacgacgttccgcttcggcaaacgtcatgaccgggaaatcccccagatccacgcctttcacttccagccataaatggcgcaccagcgcttccatcacttcgcgcacctgtggcgcggtcatgaaggaggtctcgacgtcgatctgagtaaactccggctgacggtcagcacgtaagtcttcatcacggaagcatttgactatctgatagtaacggtcgaaaccggacatcatcaggagctgtttgaacagctgcggcgactgcggcagcgcgtagaatttacctttgtgcacgcgcgaaggcaccagatagtcgcgcgcgccttccggcgtggctttggtcagcatcggcgtttcaatatcaaggaaaccgtgatcgtccataaaacgacgcaccaggctggtaattttggcgcgggttttcaggcgctgcgccatttccggacgacgtaaatccagatagcggtacttgagacgcgcctcttcggtattaacgtggttagcgtcaagcggcagtgagtctgcgcggttgatgatagtgagagaggacgccagcacttcaatttcgccggtcgccatatccgcattgacgtttttcgcgtcacgcgcacgcacggtgcccgtaacctgaatgcagaactcattacgcagttcagaggccagctttaacgcgtccgcacgatccggatcgaagaacacctgcacaataccttcgcggtcgcgcatatcgataaagatcaggctgccaagatcacgacgacggttgacccaaccacacagagtcacctgctgccccacgtgggacagacgtagctgtccgcaatattctgtacgcatgagatatcccttaacttagccgcaggcggattgttgcctgccatgcaggcgacgaagtcgcagctttagctgtatgtcacaactggatgaaaaaaggcggctattatactggaaattctgccgcacgataagagtcaatccagcatgggagcgataacttgcccgtttcatgcggtatcgacacttggttcatactgactgtacccgggtttttcacgcgggtattgcgtatgctcacaaaaattaacaatatttgtcgccgctttcctctttaatcgcgcttaaggtgtagtgaaatccgctatttttaggagagtgattatcatgctgaaactcaacgcgaccacaaccgccctggtggttattgatttacaggaaggaattcttccgtttgccggcggcccgtatacggcaaatgaggtggtcgcccgcgccgcgcggctggcggaaaagtgtcgtgccaacggctcgcccgtggttatggtacgcgtcggatggtctgatgattatgccgaagcgttaaaacaacccgtggatgccgcaacgcctgcgcacgcgttgccggaaaactggtggacctggcctacggcattgggtaaaaaggacagcgatctggaagtgactaaacgccagtggggcgcgttttacggcaccgatctggaattacagcttcgccgccggggtatcgacaccatcatattgtgcgggatctcaaccaatatcggcgtcgaatccacagcgcgtaacgcctgggagttggggtttaaccttattattgccgaagatgcctgtagcgccgccagcagtgagcagcatcagagcagtatgacacatattttcccgcgcattggccgggtacgcagcgtagaggatattttaaacgccttatgatctacattggcttgccgcaatggtcgcacccgaaatgggcgcggctcggcatcaccagtctggaagagtatgcccgccactttaactgcgtggagggcaacaccacgctttacgcgctgccgaaagcggaaattgtcgatcgctggtatgcgcaaactacggacgatttccgtttttgctttaaatttcccgccaccatttctcaccaggccgcgctgcgccattgcgacgatctggtacaggcgttttttacccgcctggcgccgctggaaacgcgtattggccaatactggctgcagttgcccgccgcctttggaccgcgcgatctccccgccttatggcagtttcttgatgcgctccccgccacgtttacctatggcgtagaagttcgtcatccgtgtttttttgacaaaggtgaggatgaacagcggctcaatcgcgggttacacgcgcgcggcgtaaaccgcgtgatcctggatagtcgtccggtacatgccgcccatccccacagcgaggccgtccgcgacgcgcagcgaaaaaaacccaaagttccggtacatgctgtcgtgacggccagccatccaatggtgcgttttatcggtagcgataatatggcgcaaaaccgtgaatttttcgccgcctggttgcagaaactcccgcagtggcggcagaccaccacgccttttctgtttttacatactccggatatcgcgcaggcgccggaactggtgaatacgctttggcatgatttacgcagcgtcttaccggaaatcggcactgctccgtccattccacagcaatcttctcttttctgaaaatgccccctatcatagacagtgccatcagccattttaaaagggagtttgtatggtaagcgcgctgtatgccgttttgggtgcgttattattaatgaagttctcttttaatgtcgttcgcttgcgaatgcagtaccgtgtcgcctatggcgacggcggttttagcgaattgcaaagcgccatccgtattcatggcaacgcggtggaatatattcctgtcgcgctggtgctgctgctgtttatggaaatgaacggcgccgaaacgtggatggtgcatatctgcggcatcattttaatcgccggtcggctgatgcattattacggttttcaccaccgcctgttccgctggcggcgggcggggatgagcgcgacctggtgcgcattgttgctgatggtgctggcaaacctgtggtatatgccctgggagttggttttctccctgtattagcgcacaatatgcgcctttatttttcccggatgtatacgttatgtctcaccgcgacacgcttttttctgcgcctatcgcccgtctcggcgactggacttttgatgaacgagtagccgaagttttccccgacatgattcagcgttcggtaccaggctactccaacatcatctccatgatcggcatgttagctgaacgctttgtgcagccgaacacgcaggtctacgatctgggctgctcgctgggcgccgcgacgctgtctgttcggcgtaatatccgccatgagcattgtcgcattatcgccgtcgataactccccggccatgattgaacgctgccgccgtcatattgatgcgtataaagcgcctacgccggttgaagtcgttgaaggcgatatccgcgatatcactattgaaaacgcctcgatggtggtgctgaattttaccctgcaattccttgaacctgccgaacgccaggcattgctggataagatttacctggggttgaatcccggcggcgcgctggtactgtcggaaaaatttagctttgaagacgcgaaagtgggcgagctgttattcaacatgcaccacgattttaaacgcgctaatgggtacagcgaactggagatcagccagaagcgcagtatgctggaaaacgtgatgctcaccgactcggtggaaacacataaagcgcgcctgcgtcaggcgggtttcgaacacagtgaactgtggttccagtgctttaatttcgggtcgcttgtcgcgttaaaagccggagttgccgcatgatcgagtttggtaacttttatcagctcattgctaaaaatcatctctcccactggctggaaacattgcccgcgcagattgcctcctggcaacgcgagcagcagcatggcttgtttaaacagtggtcgaacgcggtagaatttttaccggaaatgacgccctggcggctggatttactgcacagcgtcacggcggaaagcgaaacgccgctcagcgaaggtcagctaaagcgtattgatacattgctgcgtaatctgatgccgtggcgtaaaggcccgttctcgctttatggcgtagatattgacaccgaatggcgctccgactggaagtgggatcgcgtactgccgcatctgtcagatttaactggccggacgatccttgatgtcggctgcggcagcggctatcacctgtggcggatgattggcgcgggcgcacatctggcggtcggcatcgatcctacgcagcttttcctctgccagtttgaggcggtgcgtaaactgttgggtaacgatcagcgcgcgcatctgctgccgttgggcattgaacaactcccggcgctgaaagcatttgataccgtcttctcgatgggggtgctttatcaccgtcgctcgccgctggagcatctgtggcagttaaaagatcagttggtcaacgagggtgagctggtactggaaacgctggtcatcgacggcgacgaaaataccgtactggtgccgggtgaccgctacgcgcagatgcgtaacgtctattttattccttccgcgccggcattaaaaaaatggctggaaaaatgcggctttattgatgtgcgtatcgctgacgtttgcgtcactaccaccgaagagcagcgccgtaccgaatggatggttaccgagtcgctggccgattttcttgacccgaacgatcgcagcaagacggtggaaggctatcccgccccgcagcgcgcggtgctgattgcgcgtaaaccgtgatggattgccgaatgaccgttacgtatagcaccgtttctccaaaatagttcaagttgcagcaaggcggcaacgcagcaaatccccgggaacgtaggtagctacgtggccggggtgcgcgaggcggccaacgctgctgcggcttgaaatatgaaggagaaaaaaaggcccctgttgaattggcaggggcctggtacgagcaagcatcatattgggcgacatgatgcaacggtaaaaatcatttggcctgatggcgaacaatgattcctttcatttcagcgaccgccgcaccctctactctatagcgagaatactcgtccgcctgtatatcggcagacatcgataacccctgattgcgatagcgcatcggcgaaggcagtaagactccggcggaactgtgtacttcccgtactccggcatcgaggaaattctgcaggttatttgcacgaacccccgcaccagccataatggttggagcatccccctgggcaataagttccataattattgataaaccttgcgccgcatcggctttttgtccggaagtcagtactcttgctacgcctgcgtcagccagattctttagcgcattgaagggattagcgcacatatcgaaggcgcggtggaatgtcaccgccagcggcccggccgccgccattattttttccattcgcgacatatcgacatccccatcaacggtcaacacgccagtaaccagcccgggaaaacccaactctctgacgaggcggatatcttccagcatggcggcaaattcgccgtcagtgtagtaaaaatccccgccgcgaggacgaataatcggatgtacgggaatcgtaatatgctcgcgtacgctgcgtaagacgccgaaagaaggcgtaagccccccttctttcggcgcggcgcacagttcgatacgatccgcgccgtttcgctgcgcggtgagcgcgcattccatgctgtaacaacagatctcaagtaacgccatattcactccgctcggcaggttaatgggccgcctgttcgctggcgacaatcgcttcaatcgaccatggatgaaattttaccgtgatgcgaccatcggtcacggccagcgtagggtttggcaaacgttcatgctcgccctgtggcgaactggttttaaccactatccccggctgactaagcccctcatccgacaacaacgccagggccctcgcgttcaaggtctccggctcgccgggcagcacgatttcaatatgctcccacccctcgtgtggatagcgtttttctcccggccacggtaattcaataacagaaaaccgccagtgttccacacataccggttcatgcagtttaaacagacaaatcggcctgccgttgatgatattttccgacagtagctcgccgcattgttcaaaaccgcgacgccaacgctccgccgtcgtattctggtgacagcgcaatgaaatgtgatcggcctcaagggcgctaatctgcagaccaaggcgagtggaaagttctctgaacgccagagtgaatcgcggtaaatctgcggaaatatcatgcagttcatcaatgtgttgccagttcgccatatcaggacgctcttcttgctgtgaaaaccgctaatttacgctgttgcgccccggcaaccaacctttgatttgattgggcgtttattgaatgcttatgcagattattgttgcgtatatttcaggcgacgcgccgcgcgcgcaatgctgacgccaacgggcatttgcagtatactcccgccctaattcttaaactggcgcgggcaatacagcccgcttcataaacgtaaggtattccggtgaatattcaggctcttctctcagaaaaagttagtcaggccatgattgctgcaggcgcgcctgcagattgcgagccccaggttcgtcagtcagccaaagttcagttcggcgactatcaggccaacggcatgatggcagttgcgaaaaaactgggtatggccccccgacaacttgcagagcaggtgctgactcatctggatctcagcggcatcgccagcaaggttgaaatcgccggccctggctttatcaatattttcctcgaaccggcttttctcgctgaacaggtgcaacaggcgctggcctccgatcgtctgggcgtttctcagccgactcgtcagacgattgtcgtcgactactccgcgcccaacgtcgcgaaagagatgcacgttggtcatctacgctccacgattatcggcgatgcggcagtgcgcacgctggagtttctgggccatcatgttattcgcgctaaccacgtcggcgactggggcacccagttcggtatgcttatcgcctggctggaaaaacagcagcaggaaaacgcgggcgacatggcgctggcggatctcgaaggattctaccgcgatgcgaaaaagcattatgacgaagatgaagcgtttgccgagcgcgcgcgtaactacgtcgtcaaattgcagagcggtgatacctatttccgtgagatgtggcgtaagctggttgatatcacgatgacgcaaaaccagatcacctatgatcgtctgaacgtcactctgacgcgtgacgatgtgatgggcgaaagtctgtataatccgatgctgccgggcatcgtcgccgatctgaaagccaaaggactggcggttgaaagcgaaggcgcaacggtggttttccttgatgagtttaaaaacaaggaaggcgacccgatgggcgtcattattcagaagaaagatggcggttatctgtataccactaccgatatcgcctgcgccaaataccgttacgaaacgctgcacgccgaccgcgtgctctactacattgactcccgtcagcaccagcacctgatgcaggcctggaccattgtgcgtaaagccggttatgtgccggattccgttccgctggaacaccacatgttcggcatgatgttgggtaaagacggtaaaccgtttaaaactcgcgcgggcggtacggtgaaactggcggacctgctggatgaggcgctggagcgcgcgcgtcgtctggtggcggagaagaacccggatatgccggctgacgagctggaaaaactggctaacgccgtcggtattggcgcggtgaaatacgccgatctgtcaaaaaaccgcaccactgactatatcttcgactgggataatatgttggctttcgaaggcaataccgcaccttatatgcagtatgcctatacgcgtgtgctgtctgttttccgtaaagcgaacatcgacgagcaggcgctggcgagcgcgccggttatcattagcgaagatcgcgaagcgcagcttgctgcccgtctgctgcagtttgaagaaaccctgacggtggtcgcgcgtgaaggtacgccgcacgtcatgtgcgcatatctgtatgacgtcgccgggctgttctccggcttctacgagcactgccctattctcagcgccgagaatgacgcggttcgcaatagccgcctaaaactggcgcaactgacggcgaagacgctgaaactgggtctggatacgttgggtatcgaaaccgtagaacgcatgtaaacgcgccgtcgttaacatcatcaggcctgactccggataacggactcaggcctttttattgccacagcggtatatctgtaacaaatcacaaggaatgacacatttctatagagagatggaacatcttttacctgtgctggcgctgaccgccccgtatcattaggcggcggattgttcaggtacaggtaatgacttttaaagactttgatgcggaagagaaactcttcctgagacgtgtgattgtggcgtttggtgtagtggttgtctgctttggtatcctgatcttcaacctctataacttgcaaatccgccagcaccactactacaccacccgttcgaatgagaacgatatcaagatgctacccgtcgcgcccacgcgcggcatcatttacgatcgcaacggcattccgctggtgcgtaacgtaacctggtatgatatcgcggttacgccctataaaattgccgatatggatgcgctgctaaaacagctcacccctattgttgatctctcccccgacgatatctccgactttcgccgtgcgctaaaatccagtagccgctatcgtccggtggtgctcaaaaacgcgctaacggatgttgaaatcgcacgctttgcggtcaatcagtttcatttcaacggcgtcacgatcaatagctatcaggatcggcagtatccttacggcgcggagctggcgcatgttctcggttacgtgtcaaagataaacgataacgaccttaaagcgctggataaaaaagggctggcagagaattacgcggcggaccataacatcggtaaacaggggattgagcgttactacgaaaacgatcttcatggtaaaaccggttatcaggaggtcgaggtggataatcacgggcgtattgtccgcctgctgaaagacgttcctcccatcgcgggtaagaacattcacctgacgctggatctccatttacaagagtacattgaaagtttgctggccgggcagcgtgctgccgtactggttgaagatccgcacgatggttcagtgctggcgatggtatctatgcccagctacgacccgaacccctttgtaaaaggcattagctatcaggattacggcaaactgctgcacgataaaaatctgccgctgatcaaccgcgtgacgcaagggctttatcctccggcgtcaacggttaaaccctatatggcaatgtccgcgctgttatgcgggattattacgccgcaaaccaccttctttggcgcgccaacctggacgcttcccggcacgcagcggcattaccgggactggaaaaaaaccggacacggtatgctggatgtcactaaagcgattgaggaatctgcggatacctttttctatcaggtcgcttatatgatgggtattgaccgtatcgacacgatgttgtctcagttcggctatggcaaaccgacgggcatcgaccttaatgaagaatatgacgggctgcttcccagccgcgcatggaaacagcgggtccataaaaaagcctggtatcagggcgataccatttctgtcggcatcggccagggttactggattgccacccccatccagatggtaaaagcgatggtggcgctcatcaacaacggtaaggtgattgcccctcacctgttactcaatgaagagagcggcaaaacggtggttccgtatcgtccttcaggaacaccggcacagatagccgatccggcgtcgccatactggggactggtgcgtcaggcgatgtatggcatggcgaatgcacccaacggaacgggctataagttctttcacaccgcgccctacggcattgcggccaaaagcggcacgtcgcaggtatttagcctgaaagaaaatcagacctacaacgcgaaaatgatccccattcgcctgcgcgatcatgtgttttataccgcttttgcaccgtataaaaaccctaaggtcgctattgccttgattctggaaaacggcggaagcgacggcgttaccgccgcacccatcatgcgaaaaatccttgaccacctgtttgatccacaggctgataccacacagccggatcaggcgccatagtcaaataagcaaagcgccatcagacaaggatacggccggaatatctgcatacatcagaaatagttacgcagatattccgtcaaacacagcattgccatcgcctgcccgtaaggcatagaggtcaacggaatatgacggtaaaaatcgagatcgtggcccatgccagtgccaaatgacgtttgcagcagttcaccttccggcgagatatgtttcactatcccccgaatagctttttccgccacctgcgcatagtgccgttcgacatagcgtttgcgcaccgctttaagaataccgtaggcaaaacccgccgtcgccgacgcctcaagataagagtgcggatcgtcaagcagcgtatgccacaaaccgctttcatcctgacatttcgccagcgcggcgatctgcgcattcagtacctggaccagataacggcgcacggcattattttccggcaagtccagcagttcaagaaaatccgggatcacaatggtcagccagctgttgccgcgcgcccagcgagcgttagcgaagttatgatgaccgtcatagctccagccgtggaaccacagccccgtctctttatccatcaaattctgcacgtgcagcaggaactgataggttgcctcttccacgtattccggccggttcaacagtttaccgattttcgccagcggcagcaccgtcatcattagcgtgtcgtcccacatctgctgatgattttcctccgccagcgtgatgtgctgcattccgccgtgatcggtacggggcatttcattcatcgcccattcggcccacgtttccagccacggtaaatacgctggattacgcgtctcttcatagcgatacgccagcgttaaaaacggcgccatcgtattaacgtttttcgtcgtcgcgccttccgcaaaacgatcggcaaaccagtcatcaatgatcttacgcatcgtctggtcgccggtctgttggtaatagtgatacattccgtacaggcccacgccgtgcgtccactcccatccggcccagcctttagtatcgatcacgcgtccgtcgtccagtcgcaataaaaattcgcctgtctcatctttaatattgaccaggttatgcgtcaccttttgcaccagggcttttagttcatctctggcgataaaatgctcaggctgacgcaatagcggactgtgtttgactggataaaccatcatttgcttaacctctgtgtaatgtcgaattcagtgctgcgtgcagttttaccgccgacgcagtcgattcgctacagtaaaagctaagctgggcggaaacctttttgtttctgccattgccagagcgtaaatggcaaaaacgcaaagagtccggcaacctacctcaccattttataaaacagcgtttctatttattcaaaaagagagtcaggtctgctacctggcaaagaaaggggcggttagcggtagttcacaatcacctgattgctccgcacttttaacgccgggataagtcggccgccgccggggacttcccagacaaagcggagcggctcgactgcgggaacatgagcaaaaccgtgggtcgtgccactctgaccatcaagttctacgcaacgggactgggaacataaacgtacccgtaagcccgcgggagtcgggccattcagttcataacgccaggcgaccagcgtcatcacaccggaaaccggctggcgcgccgacaatggcgaagacgatgcggaaacaccccggtaatttaaggttacacccataccgctatcctgccacgcgccttcgcctgcggcctgaaccgtcaggggaaagagcaacaacgccagccatttacgcattattttcctccaatggtcgccgtcatgcggatatgacggttatcggaaagctcaaggttcgacaacaccaccagctgcggtaaactgcgccgcaaaaagcgggacaataatggacgtagcgcatggttaaccagtaataccggcggcgcgccaagcatttcctggcgagaaagcgcttcttgggtctgcgccagcaggcgatccgccaacccaggctcaagtccaccgccgccctgcaatgcctgaagcagcaaacgctccagcgcggtatccaggccaatcacctgcacttcttcattaccggggaaccactgttgcgtaatcgctcgtcctaatgccacgcgtaccacggcggttaattcatgcggatcgctttgtaacggcgcatgttccgccagcgtttccaaaatggtgcgcatatcgcgaatcgggactttttccgccagtaagttttgcaggactttgtgtaaagtcgtgagggtcacgacgccggggaccagatcttccgtgagtttaggcatctcctgagagacacgatccaacagttgctgcgcttcctggcggccaaacagttcggcggagaattggccaatcaagtggttaaggtgcgtcgccacaacggtactggcttccacgacggtaaagccctgaatttgcgcctgctctttcagggcgctttcaatccagatggcatcaaggccaaaagctggatcgacggttttctcgcccggtagcgttcccgccgccgtgccggggttaatagccagccagcgtcccggataggcgtccccgctgccaatctctacccctttcatcaaaatacggtagcgcgcaggctgtaaatccatattgtcgcgaatgtggaccaccggcggcaggaaccccatatcctgcgcgaattttttacgaatactgcgaatacgtccgagcaattcgccatcctgttgaaaatccaccatcgggatcaggcggtagcccacttccattcccagtgaatcctcaagctgtacgtcattccaggtggcttcgaccaccgagttattttccggcatttttaccggctgcggctcctccggcgctttttcttcacgcccgcgcagccaccatgccaggccgagcaaagcggcggtaaaaagtaaaaataccaggttaggcattcctggcaccatgccaagcagccccagcaccgccgccgccagcagcatcacccttggattactgaacagttggccaaccatctgctcgccaacatcctgatcggtactaacgcgggtcacaatgacgcccgccgccgtggagataaccagcgccgggatctgggcgaccaggccgtcgccaatggtcagcagggtgtagctttccgccgcgctgcctatgctcattccgtgctgcaatacgccgaccagcagcccgccgaccacgttaatgaccatgatgagaataccggcgatggcgtcgccgcgtacaaatttacttgccccgtccatcgagccgtagaagtcggcttcctgagtgacttccgaacgccgttttttggcctcgtcttcaccaatcagaccggcattaagatcggcgtcaatcgccatttgcttaccgggcataccatccagcacaaagcgcgcgccgacttcggcaatacgtccggcgcctttggtgatgaccatgaagttgataatgacgaggatgataaaaaccacaatcccgatcgcgaagttaccgccgaccaggaaatgaccgaacgcctccactacctttcccgccgccgccgcgccggtatgcccttccatcaaaataatgcgcgttgaggcaacgttaagcgccagacgcagtagcgtggtaaacagcaggatggtcggaaacgcggcaaaatccagagtacgctgggtaaacatcgccaccagcagcaccataattgatagcgcaatattaaaggtaaacaataagtcgaggataaaagcaggtagcggcagcaccatcatcgacaaaatcagcagaatgaggatcggcccggcaagaatttgccattgcgtcgatttcaggttgctgggcaggcgcagcatcgcgaccagattagccatcagtattcttctcgttcataaaatccagcgcttctggcaccggaaggttctcaggttgtggaggacgttgcccgcccgcaagccgccagcgtttaagctgccagacccaggccaacacttccgcaacggcagcatataactgcccgggaatttgctgaccgatttcggcgtggcgatataatgcccgcgccagcggcggcgcttctaaagtgggaacccgatgttcagcgccgatctcgcgaatgcgcagcgctattaatccagcccccttcgcgaccactttcggcgcgctcattttgttttcgtcatactgcagcgccacggaatagtgcgtcgggttagtgacaatgacgtccgctttcggcacatcttccatcatgcggcgctgcgcggcggcgcgttgcatctggcgaattttgcccttaacatgcggatcgccttcgctctctttaaattcgtcgcgaatgtcctgccgcgacatgcgtaattttttcaggtggctaaagatctggaaaaacacgtcaaatcccaccatcggaatcacgcccagtaccaccagtaacgcgcagagtccaaccagatccagcgcattccccattgcgacgatcggcgactccgccatcaggcgcatcatttgcggccagtgatgccagagataaaagccggtaacgcagccgaccagcgtggatttcaacaccgcttttagcaattccgcgccggtctgcgccgaaaacatgcgcttaattcccggcagcgggtttaatttagaaaattttggctgtagcgacttaccgctaaaaatcaggccgccaagcataaccggcgagataagcgccaccagcaccacgcccgcgatgagcggtagcagtgccatcatcgccgctttaatcagcaaaattatctgccccaggatcaggttaggatcgttcaccatacggtgatcgaagtgcaggcctgctgagagcattcccgccagctgccgcgctaacgactcgccgccgaaccaaataatacaaacgcccaccagcaatatcagcagtgaggtcagttctctggaacgggggatctgcccttcttcccgcgctttttcaagtcggtggggtgtgggggcttctgttttgtcgtcgtcgctctcttctgccacgcagcaaaccctggatagattgataagagagaatgatgccagaaccgctttacgccaataggcagagtaagcggtaaaaaaggcggggtttatggcgttaatagagatagccggatacgataagaaagtctcgtatccggccgggttgacggattcgaacccgataagcgcagcgccatcaggtcaaaaaagcttaaaagccaagactgtccagcaggtcgtccacctgatcctgactggcaacgacgccagctttcgaggtatccacctgcgggccgttgagcaagctttcgttctcgcgttttggtcgcgcgctctgttccgggatgttttccagcagcaccattaacaactggcgttcaatctcctgaatcacgtccatcatgcgtttgatcacctgacccgtcagatcctggaaatcctgcgccatcatgatgtccagcagttgcgcgttagtaaagctggtatggcccgggacatccctgagaaactggcgcgtatccgtcaccagttcacgggcgtcggaaagctcgatcggattgtcaaaccactcgtcccaacgttgggttagcgctttcgcctctttttccatcgcatcctgatgcggctgcgaggcttcgacactgtttagcgcgcgttccgccgcctgcgccgtcatctggacgacataatccagacggtcgcgcgcatcagggatcgcctccgccgcttcggcaatcgcctggtccagccccagttcacgcaggctgtcgcgcagcattcgggtcagactaccgatgcgcgcaatgatgtctcctgctgagccttcatcagcaggcttgatagatggttgcatcatcatcgcatcctcacatgcccagtttctcaaagattttgttgagcttctcttccagagtcgctgcggtgaacggttttacgacataaccgctggcgccagcctgtgcggcggcgataatattctcttttttggcttccgccgtgaccatcaacacgggtaacgccgacatggcgctatcggcgcgaatggttttcagcagctccaggccatccatgttcggcatgttccagtcggagataataaaaccaaagccgcccgcctggagcttgttcagcgcatcgacgccgtcttcggcctcttccacattgttaaatccaagctcttttaagaggttgcgcacgatacgacgcatggtcgaaaagtcatccacaaccaaaaatttaagctctttatccgccataaaatactactcctggttcaaatacgtatcgcctgtccggcactgattttcgccaacatctgctggcttacctggctaagatcgaccacttcgcttacgccacccatattgatggcctcgcgcggcatgccgaacaccacacaacttgcttcgttttgcgcaatggtccaggcgccagcctggtacatcgctaacattccagcggcgccatcgttgcccatccccgtaagaatgacgcctacggcgttgcgccccgcgtgtttcgccaccgaatgaaacagcacatccacggaaggccgatgccggtttaccggcgggccatcatgaattttgatttgataattcgccccgctacgcgccagctccatatgcttgtcgccgggcgcaatgtaggcatgacctggcaatacgcgttcgccgtcctcggcctccttcacgctgatttgacagagtttattcagacgctcggcaaacgagcgggtaaagccaggcggcatatgctgcgtaataatcactgccggactggaaagcggcagcggttgcagcacatgtcggatagcttcagtaccgcccgttgaagcgccgatagcaatcagtttttccgaactgagcagcggacccgcttttaaggttgtcggggccgccatcggtttatgtgcggcgatgcgggcccgcgcggcggtacgcactttttcggcgatcatctcgctatacgccagcataccttcacgaatgccaagctgcggtttggtgacaaaatcgatggcccccaactccagcgcccgtagcgtcacttcggaacctttcccggtcagcgaagagaccatcaccaccggcatcggtcgcaggcgcatcagtttttccagaaaatcgaggccgtccatacgcggcatctcaacgtccagggtcaatacgtccggattaaattttttgatgagatccctggcgaccaacgggtccggcgcagtcgccaccatctccatatcgctatggctattaataatttcagtcatgatttggcgcattagcgcggaatcatcaactgacaataccctgattttactcatgctttatccttacttagcgcatacaccgtctgtccgcgcaggctaaactcgcgcacgaggttgctaaagttttctgagtgaccggcaaacaacagtccgtcaggtttaaggagtggaacaaaacggcgcagaatgtcctcctgagtcgttttatcaaaatagatcatgacgttacggcaaaaaatcgcgtcaaagggaccgggtacgttgtactgcttttccaataaattaacggaggaaaattcaacataattggccagttcctgacgcacgcgcaccagtccttcatgcggccccgtaccgcgcatgaagtaacgttgtagctgctgcggcgataacgttttcagttcgctgaggcgataaataccgcttctcgctttttccagcacttcagtatcaatatcgctggcgaatactttccagcgaccgggggccatccctaacgcatccgccagcgtaatggcgatactgtaaggttcttctcctgtcgatgccgccgcactccagacgcggtactcgccgtggcggcgacgcgcatgttccgcaaggatgggaaaatggtgcgcctcgcgaaaaaaagcggtcaggttggtagtcagagcgttgataaaagcctgccactcagcgctgttttgattagcctccagcatactgagataacggccaaaatcatccagtcccagggcacgcagccgacggaccaggcggttataaaccatatcccgcttatggtcggccagcacgatccctgcgcgctggtagattaattgacatatccgacgaaaatgcgcgtcggacagcgcgaggcgctgtgtcatctgtaacaatactgacgtttgcccggagggcagagatgatgtcatagcgccttcttaatcacattcaaagtacaacgggcgcgccctgcggcagcgccatgcttcccgtattacacattttttgcttttatctatgcgaaccagacgaaaggtatcggcgggttcgcaaattaatcgataaccgacagcgcacgtcgatcagaaggtttcccagttcgcatcatccctggcggctaatgactgcggcgtattgccggactgagcgttcactgacaaacgcatctcaggtttatttaccgccagcggtcgcgatgccaggcggaaagccgataccgcctgggtcagacggctggcctgctcttccagcgcggcggcggccgctgcggattcctgaaccagcgaggcgttctgttgcgttacgcgatccatttcggaaacggccaaagcgacctgatcgataccccggctttgctcatccgaggcggaggcgatttcgcccatgatatccgtgacgcgcgtaacggcattgacgatgtcagtcatggtttccccggcgctttccaccagcacagaaccggtatcgacacgcgagacggaatcttcaatcaacgcttttatttctttcgccgcctgggcgctgcggctggccagattacgcacctcgcctgccacgaccgcaaaaccgcgcccctgctctcccgcgcgcgccgcttctaccgccgcgttcagcgccagaatgttagtctggaaggcaataccgtcgataacgctgataatgtcagcgatttttttcgaactgtcggcaatttcgtgcatagtgtttactacgccgtcgaccactttgccgccatgacgcgcggtctcggaggcgctttgcgccagttgcgaagcctggcgggcgttatcggcgttttgcttcacggtggccgtcagttgttccatgctggcagccgtctcctccagagcggaggcctgctgttcggtacgggaagagaggtcggtattaccggcggcaatttcactggtgccggaataaatcgcatccgaaccttcacgaacctgcgttacggtgtcaatcagcgagcgttgcatatgttcaaccgttcccgccagttcgccaatttcattacgtcctgagacggtgagcgttttcgtcagatcgccgctggcaatttcacggatatgagtaatcactcgcgctaatgggttaagcagggcatgacgaatgccgaaccaaaccaccatcaaaatcagcaccagcacgaccgcaagaacccccagttgccattgcgcaaaacggtagtcatgagcactttgatcaaatgtctggcggtacaggttttcgctcacccgggcgtaattgcccagcgcctcgcccaacgcgttttgcattccctgggttggctgggcgaagtaggcatccatattgccattgtccagaaactgaataagttcggctaatgcggcctgatagcgctgatatttttcatcgacgttcgcgctggcctccgccatcgctggcaatggcgtcatatttttgaaattggcgtagtgcgccgccgcctgtgcgagagtcgtttttgcattctggagtaaatccgttttggcgctgctctgctggttagaagcgtccatcatcatgcgtgcggcggagcggctcaggttaatgcgcgtttgcagcattaagtcccatgtcgacgtgagttcgctttgttgctgacgtaattcgttagaaataacaaaaccttgctggttatgctgtaatgaagaaaacagcaaaccaccggaaacaagctgtagcagtgcgaaaacccccagcaccatcatcagcattgtgacaacgcggatacggttaaacataaggcaccttcctgataacgagttatcaacgttatcggcacctgcggtgataactttacttttgcaaaaaggaaatacgctgttccggaagacgacattgccaatgacagtgtcgcagcggcgatgccggcgcaaaatgcaggggctgggcgcgggcgatgaagaggcactctcaccgctggcggaagcataacggtgaatattgccggatggcgcgacgccatccggcaacgttattacgcgacgtgtgatgctgcgatatccagcagcgccatctcttcgctgttaagcagtttttcgatattcaccagaatcagcatacgctcgccgagcgcgcccaatcccgtcaaatattctgttgacaaggtcacggcaaattctggcgccggacggatctgttccgccgttaacgacagtacgtcagacacgccgtctaccactatcccgacgacgcgttgccccagattcagtacgatcactaccgtattgtcatcgtactcaacgtcgccttcgcagaatttcacgcgcagatcgacaatggggacaatcacgccgcgcaggttagtcaccccttttataaaggccggtgtattggcgatgcgcgtcacctggtcatagccacggatctcctgcactttcaggatatcgatgccgtactcttcatttcccagtgtaaacaccaggaattcctgacctgacggctcgccggccagtttgcttacattactcataccggtcatattattcccttctcactcaatcaggcggctgtgatcgccatacgttgttcgcggtttaaaccctgcaatgcggaaacatcaacaatcagcgcgacgctgccgtcgcccaggatcgtcgcggcggaaatccccggtaccttgcgataattgctttccagatttttgaccaccacctggtgctgaccgatgagctgatcgaccagcagcgcgtaacggcgtcccgcgctttgcaggatcacaacaatgccctgcgtggcttcggttttcgccccgtccacgtcaaacactttccacaattcgaccagcggcaaatactcgccgcgaacttccagaacccgttcgccgcccgccagcggatgaagatcctcttcacgcggttgcagcgactccatcaccgcattcaacggcaggataaaaacttcccccgccacgcgaaccgacatcccatcgaggatggccagcgtcagcggcagcagaatacgaatcgtggtgccggagccttgttttgactggatctcaacgtgaccgcccatctcctgaatgttacgtttcaccacatccatgccaacgccgcgaccggagacatccgtgacctgttccgcagttgagaatcccggcgcgaagatcaacatgcctacttcatcgtcggtcatgttttcattcaccgccatcccctgcgacatggccttcgccaggatacgctcacggttaagccccgcgccgtcatcggtcacttcaatacaaatattcccgccctgatgttctgcggaaagaatcagattgccgacaacatttttccccgcctcaaggcgtttttccggcatttcaatcccgtggtcgagactgttgcgcaccaggtgcgtcagcgggtcgataatgcgttcgatcaggcttttatcaagttcagtggagctccccaccagcgtcagctctacctgcttgcccagtttgcccgctaaatcgcgtaccagacgcgggaaacggctgaagacgtactccataggcatcatacgaatcgacatcaccgactcttgtaagtcgcgggcgttacgttgtaactgacccatgctggtaatgagatcgccgtggtttaccgggtccagctcgttagaacgctgggccaacattgactgggtaatcactaactcgccgaccaggtttatgagctgatccactttctctaccgccacgcgaatgctggtggactcgcgttcacgcgcaggtttttcacgccccgcatgatgttcatgggccgcgcttttggcggctggcgcaacgactgccggaggcgctaccggcgctacctcggttttctcttgcgctttttcaaccggcgcggcgaccactttttcaaaagcgatctgatcggcctcgatgacaaaacagagcaccgcgacaatgtcatcttccgcgacgctgccatccagagttgccgacagtgaatccgcccccttaacgacatccgtcagagtagccagattgcccaactcttcttcaagcagatcgacctcattggctttcaaccgtgaaagtacaatgcgcagtttactctcgtcacgaggcgattcggtttcggctacgctctcttcctggatcgccgcgcttagtgccgcggtttctacgaccgccggcgtggtttcgcctttcgcctccagcgccaactggcgtagcgcattgcagatatattcgaagcttgcggcatccggctcttcggagtttttataggcgtcgagctgttcctgcataatatctttcgtttccaaaaacaggttgataatgtcggtattgagctgcatttcaccgcgtcgggcttcatccagcaggttttccattaaatgcgtggtttcctgcagaatagtgaagccgaatgtgcccgcgccgcctttaatggagtgcgccgcgcgaaaaatggcgttcagttgttcagcgtccggggactccggcaccaaatccagcagatgctgctccatatcagccaacagctcgtcagcttcatcaaaaaatgtctgataaaaatcgctaatatccatgctcacgctatcacctcggttccgcttttggcgatgtgggtacgcttgccggcggggctgccgcaggctgttgtaatacacttaccggctcattctggctttcagcgttttcatgcaaaatggcctgttccgcctgtttgtttaacaccagcaggcttatacggcggttgatggcgtcatcaggaccgcgatcgctcagccgcatcgtggcggccatgccaaccacccgtaatacttttccgttatccagcccgccagcgaccagttcgcgacgagaggcattggcgcgatcggcggataactcccagttgctatagcctttttcgccgttcgcgtagggaaagtcatcggtatggccggccaggctaatgcgattaggtataccgtttaacactggcgcaatcgcacgcaggatatcgcgcatatacggctcaacttcggcgctgccggttttaaacatcgggcggttctggctgtcgataatctggatgcgcaacccctcctgaactaaatcaattttcagatgcggacgtaacgcgcgcagtttgggatcggattcgatcagttgatccagatcgccgcgcagtttgtttaagcgactctgctccatccgttttttcagctcgtcgatattcggctgcttttccacttcaccctgctgttgggtgtaatcatcgccgccgcctggtatcgggctctcgctattggcaatccgattcccccccgttaccgcggtggccaacggcgtacgaaaatattcggcaatctgaattaattctttagggctggagatggaaatcagccacatcaccagaaaaaaagccatcatcgccgtcataaaatcggcgtaggcaattttccaggaaccgtgcgccccgccgccgtgcggtttgtgcctgcggcgttttacgacgacaatgggatgagcctgatttttcatgcttcctcagtcgtctgctgctggtttgggtttctcactgcgcgaacgtgttcttccaactcaataaacgatggacgctcactggaataaagcgttttacgaccaaattccacggcaatcggcggcgcatagccgttcagattagacagcagtgtgatttttacgcactgcatcatcttggtggtttcggcgctcttctggcgcaaaacggtcgctaacggtgaaatgaatccataagccagtaaaataccgaggaacgtacctaccatggcatgggcaatcagcgcccccaactccgctgccggacgatcggctgaagccagagcgtgaaccacccccattaccgccgcgacgataccaaaggcaggcagcgaatcccccaccatcgccagactgttggccgggacttccgcctcgctttcatgggtttcaatctcttcatccatcaacgcttcaatttcgaacgtattcatgttgccgctgatgatcaggcgcagataatcgacaataaaatcaagcattaccgcatcggccagaatacgcggataactggcgaagatttcactctcttttggattttcaatatcgcgttcaagggagaacatcccctgctggcgtgatttggccatcaggcgatagagcaacgccagcaaatccatgtacatagattttgtgtatttcgaacgacgaaataacaacgggatagctttcatcgtgcctttgatggccttcccgttgttgccgacaatgaacgcccctatccccgcgccgccaatgatgaccagttcagcaggttgatagagtgccccaaggtgtccgccggtcatgacataaccgccgaaaactgtaccgataaccaccaggtaacctaataagataagcacgacatcatccttccgctgttgactatgacaggatgcgcagtcgggcgattaacgcgaaggcaaggcaaaaaaaagcagcggtaatgacttaccgctgctggagtgtttgtccacaccgtttcggttaaacagcctgttcgatctgttcatccagcagttgtggaataatatcggcagcatctcgggaaagtttacgtctttttactgcgcgggatggcggctggcataaactacacgcaaagctgcctacgggctgatgcgcatgggtaataaagttcccaccgcagcagttacagctcgacaattcaagcaacccactttcaacaaaacgcaccagcgtccatgcgcgagtcagcgccaacaacggcccttcaggcggttgcggacactgctcaagataaagccgataagctttaatcaccgcatccacaccgctgcataagccggtcttcagtaaaaattgccaggcgttgcagaacatggaggcatgaatattttgctcccaggtcataaaccagtctgtcgaaaatggcagcatccctttaggcggcgggctaccgcgtaattctttgtacagcctgatgaggcgaccacggctgagctgtgtttcgctttccagcatttgtagacgagcgccaagattaatcaactccatcgccaactggatatcgcgagcttcctgaacaatgcttttttcactcattatcatgcccttttcttacgcgccgtatcgtccacttcattgagcagacgcgttgaaagcatgatacctgtgtgaatctgctgtaagtcatcgacgcgcgaatcctgagtcaaacgggtgatcgtctgatgatcgtcaaaccggaaatgacaaactaactggttcgtctccgccagtttgaccatctgcggcagggtcaacgcgcccagtgtgtttgccatctcttcgttgataccgaggcggaacatcgcagatgctttgtcctggacgatcaaacgctgtgcaaggagtaaatatgacaaattgatgtcataaatgtgttttagcaactcggatgtatgcattgttcccatccagaataaccaactttatttttgtgcgacgtagccgcaccccgtgatgtcgccgggaaggcccggtaaaagaagcaaaaaggtcaaatgcatagcagcgctcagacattatggacattgtgacgtataacgcagcctcccactgagattcgccttacacgtttacatcaatttttacaaatgcctaagatttttcctaattcgacgcaactctactcgtcagcttcgtgacatacaacggagcgggacggcgattttagaaaatatgtgatgcagatcacatattttaacggaatacttacgataaaaccatcagcatggcttttactttgtttaattaataacctaatgttcactttttctattccacactgctgaataggggtacgtcaacaccaaattcttttttgtttctctctgttaaaataacgccaggataatagataacaggctattatttctattttagaaacgcttttattttacctttagtaaacagtagcttaaatattaaacgttattaattaatctcgtcacagcatacgccctccgctgttaaaaataagctcatttgatttaacttttagctttccttgttcacccatttaaatgaagcatccgggtggtgtgtaaaaagtgtcttatgccacgattctttacataagaataattaatgattaattatgatgtccttcacattaatgtggcattagcgcattgcagaaatgcgataaacagagtaaagctaaagcacaatctcatattcttgcaatcaaggagcgagttatgagctacacccatattcttgtcgccgttgccgtcaccccggaaagtcaccagctactggctaaagcggtctctatcgcccgccctgttcaggcgaaagtaagcctgattactctcgcttccgatcctgaactgtataaccagttcgccgcgcccatgatggaggatttacgcgcggttatgcatgaagagaccgagaattttcttaagatgctgggggaaaaggcggattatccgattgaacaaactttcatcgcatcaggtgagttaagccagcatattttggctgtgtgccgcaaacaccatgttgatctggtcatttgcggcaaccataaccacagtttcttttcgcgcgcgtcctgctcggcaaaaagtgtcgtcagcgccagccaggtagatgtgttgctggtgcccttagcgggcgactagtcgccgctcgcgatatttcaggccagcttagggaacgtcgccacgttgttctgctgctgacgctcagggctacgcggcgtgacctcctttaggtcatgaataaaacgctcctgccagcggttaatgtcatttttaacgatcacgtccagcatctccgcatgacgcgaaatacgctcggcaaggggcatcgttagcgcacgattgagcgccgccgccacgtcatcccgatcgtaaggattgacgattaacgccgacgtcagttcattcgccgcgccggcaaactgtgacagtaccagtacgccagggttagcggggtcctgcgcggcgacaaactctttcgccaccaggttcatcccgtcacgcaacggggtgacgagcccgacgtctgaataacggaatatcttcattaacagtttacggtcgaaatgttgattcagataatagagcggcgtccagcccaattgtccatatttcccattaatccggcctgcttccgtctcaagctggtggcgaatatcctgatatgcctgtacttcgccgcgtgacgtaggcgcaatttgggtataacgaatttttccccgatgctgcggatagttttccagtagcgcttcatacgccagaaaacgttccggcagccctttcgaataatccagccgctcaacggaaaaaatattcttcacatttttcagttccgccttgagctgcgccagtttaggcggcaacggcccggcagcctgcagagcaatctcatcgggctcaataccgataggatacacttctgtctggaagtctttaccccacgcgatatgctgcttgccgctgcgagtcgtgactcgcgtttgactcgaaaggctatccagaaaagccaggcgatcattttcggtctggaaccctagcagatcaaagtcacacaactgctccagcagttcatcatgcggcggtaaggcgttaaaaatctccggggtcgggaatggaatatgcaggaaaaaaccaattcggttgttcacgccgcgtttacgcagctcgctggcgaacggtaacaggtggtagtcatgcacccaaatgatgtcgttctctttaatgaggggcaataacttatccgctaataacgcattcacccgcatatagccttcccatgcaggacgctgaaactgtaccaggtccagacgatagtggaacgcaggccagagaaccgcattggaaaattgacagtaataatcttcgtaatcttgttcgctcaggttaaacgatgcccaggtaatattaccttttgtcaccttttttaatggctcatcctcgttacctgtctcgccactccagccgaaccacaacccgccagccgcttttagcgcgccaagcacgccaacggcgaggccgccggcgccgcctttattatccgggggggcaattcgattagatactacgactaaacgactcatagccatctctcctgttattcattacttgttgttcttgttgtggataattgatttgttccagccagcgccagacatcgggtacgctttccagccgccatgccgcctgggttgccccgacgcccacttttacggaaattccgccagcgtgattcaccacgccaaagccagcctcatcggtcaaatcgtcgcccacaaaaacgggaatccgtcccgcaaagggcgcctcctgcataaaggcggcaatggcttcgcctttattggttcccttaggtttgatttccacaacacatttaccaggctgcaacgccagttgcggccagtgctgcgtaacgtgttgcgcaagcgccaacagcgccgcttcatgttccggagcctgacggtagtgcagcgcaaatgccatccccttcgactccagctccgttccgggcagcgctacaagcgtcgaacgtaataacgcctctacctcacggactaccgcttcaggaaggcgcacgatatgggttttaccattgatgtcacgacgctctgccccgtgaacgccagcgagtggaaagcgaaaaggcttcgccaaagcatccagctcagtcattgaacgccctgaaatcaatgccagtgcccctgcgttgtgcgccgcgagacggtctaacaactgaaggattttatgcggtaccactacctgatcgggatgaggctttatctctgccaatgtgccatcaaggtcaaaaaaatacgcatagttcgcagtgagttcgggggatacggttaacggttctgccaccctggtctcctccttatcatcatattgagactcacaaacggtctcattagtcatgtaagtatagacagtgtgacgctgctcgccatttagaaagaccatcgccagccggggtagcggctggcgatgacgtgaagctatactgtttagttgagtgttaattcatcaaatcgtacgcttcgctttttgcttataatggtcgaagataactgttgtcagaaggattcagccgcgaaccatacactgtgcaaaaggtgaaatgttgagcaggttcatcgcgctctccaccgctcctgatatcagtacgctcgccaccacatatgagacttttccgaggccgcctttcaggaatcccccccctaagacacacgcagaaataacgattaactcataacccagggaagtcattgacctgctttagcgttttttatgtagggtaaaatcaaacaattcttgttagagaagacgtaaaacggtgcactgtctttcattcattagataaatgctgatggcaggaatagttttagcggaaaatgacataacccagagcgaattcatcagccaaaaggcaggaaagccagcacattaatccataacatcagccagctaatccttacggccctgggtgaataacgattaccagggataatagatatgttcagcctgttcgcgaaccggcgcatcgtctcccagcagtctggcggaaagggttagcgcgaaatcaaagacatgacccaaccctttgccgctaattaaattaccatcttcaaccacgggcgcatccacatagacaccttccggaaccgctttccacagatcgccggaacagacataacgacgccccttcagcaatccgtgagcacccagcacccttgccgccgcggaacagataggacaaattaatttgcctgccgcatcatgacgcgcaacgaaagcgatcaccgccggattagccgccagattagcgctcccctgcggaccgcccggtagcactaccgcatcgaaaagcgcctgctggcgttcactcagcgtgctgtccgcaaccataggaatatcatggtaactcaccaccgcccgtgattcagcacacgccagcgtttcgacgtcgatatgcaaacgtcgcagaatatcaagagtaacaatggcctctgcttcttcaaatcctggtgccaacagcaccgcgacctttttcattgactgctccttgttaacgagtcacccagcaaaactgcgctcaaccgaataacgtgctcgtatgattaatgatattaaaaatgatctaccgcaaaatcggctagtttataaaaacaggcatatttgctctcaaccgtttatgcgtgtgatatccagactgactaatgtttattttattgaaattaacatacttgaaaggcttaacccatgatctgaaacaatgtttcataaattacaaatctatataatatcatttaactttcaaagggttgcaactgctcctcatccaaaatcattacacctgaaaaaatcacaccgctgaaaatgtaaaaaaagataaacaattacatttaaggattttcttatttttattgacgcgctattctcattaccgatcgataaacaggaaatgagatcgcataagggactggcggaacggagttcttctgctaagagtatttattgtgcatagaggtaagaatgtgacaacggcccgttgcattctcgtctgtcatgcacatcaacactttctggaaataaggatattgttatggcagctgtaggaatggttcaaaagctcaacacgccaatgaaccttgagttttacgcatcaaatctttacctccatctaagcgaatggtgttctgaacacagtttaacaggcaccgccacctttcttcgtacccaggcgcaaggcaacgtgacgcaaatgatgcgcatgtttaattttatgaaaaacgccggcgccacccctatcgttaaagccattgacgttccgggtgaagagctctgctctctggaagaattgttccagaaaaccctggaggattatcagcaacgcgccagcacgctgtcgcgtctggcagatgaagcgaaagcgctgaatgatgcctcaacgcttgattttctccataccctggaaaaagagcagcagcaggatggcgtacttttacaaactattctcgaagaagttcgcagcgctaaacgagcagggctatgcctggcgcaaaccgatcagcatctccttaacgtcgtgacctatcagcatcactgatagcggcaccccgagcgacaatattgagacgttattagccggatagcaacgcgaagcagcttatccggcctacaccgtttctgatctgtttgccagaggtggtgcctgtcgctactggcgtattatcggcacatcatgccagccgacaggcgcgaaacgcctctgtcttgtctgggcattaccccagcatctcacgtacaaacgcttctatttctttattctggccgttttcaaacaaacattgctggaaacgcggccctgaaaccgccgttttaaccagttcaggatcgatagcccgtagtgtatccagataattctctttgacgaccgcggccttaacctggttcaaaatgcccgcattgcgtacctgcggcgctttgcgctcaggcggatacccctcgcctttacgcccggtaaacgctttttcaaagatgaaacgcacgttcagctcagcgccccagccaaagcctttcgcaaatggcagggacaacgcattgccgttgttgatctgcgcaaacagaaaagcatctgccggatcgatgcaatagccacaaatgacacctggatgaatatttaacgacatcagcgcgccctgaccagtgccacagccagtaaccacaaaatcaaccgcgtttgcattaagcagaatactcgccatgatgcctaaatgaatgtacgtcaggtgatggtcattttcgtcgcacatgccgacgttaaaaacgggaaatcccttttcattggcgacggcgctaagttcgttataaatgatggcatttttgctggcctggctattttccatcatcagtgcaattttcatcgtgtttctcctgaatgcagacggtcgcgcctgcgtaaatcatgacgttttacccacattacacatttgagaacacacattcaaatttaataaaaccaggtttcattaaatgaaaagacgctcacacattttctgttcccgctgtaaatcccctgccgttacctttaatcaaggcgaatccgtaagttattccagccattgacagtgcaagacacgaggtagcatggtctgataccgaactgtcggagcgattttatgaagcctcttatttttactctttcactgctagccctgacgggatgcaccattactcgacaagcgcaggtcagcgaagccagcccgataagcggcatcgtgcgcctgacgtataaccagccgctattttttacttcacggacagatgattatgtatctcacgggaccgcaacacgcgaatgccagcagatgggctatgccgatgccgtttcgtttggtcagccggtaggaacctgtagcatttatgcgggctcgttgtgtctgaacacccgatttaccctctcctggcagtgccggggcgttgccgtcccgcaaatcatgccgctttattattaaggcggctggcttaacgtcgacaccatctacaatggaggagagtgcagggtcgctattgccagcatgaaggtgctggctttcctttatttttatacgctatacactggcgttaatgcgttttattcccattcgtatttttaataattaaatttaatattttaccttttgcaaataataaaataacaaattatagtggcgccacattaccgtatatcttttgctatttgtggagcggaaccatgctgaaaacagaaatgatcgacaaactgaatgagcaaatgaatctggagttgtactcctccctgctctatcaacaaatgagcgcgtggtgtagctatcacagttttgaaggcgcggccgcatttcttcgtcgccatgcgcaagaagagatgacgcatatgcagcgcctgtttgactaccttaccgataccggaagcctgccgcgcattcataccgtttcttcgcccttcgctgagtacgcctcgctggatgagctgttccgcgcgacctatgagcatgagcagcttattacgcaaaaaattaatgaactgactcatgccgcaatgaccagccaggattatccgacatttaatttcttgcagtggtatgtggcagaacagcatgaagaagaaaaattattcaaatctattattgataaattaacgctggcgggaaaaagcggcgaagggctttatttcattgataaagaactctccaccctggatacgcaaaattaatccaacacgtccttacacggtgagacgcgctctcaccgtggcgtattaatggcggcagattttactctcatgcgttgaaaaaccgtcctccaccgcaataaactttcctttcgccgccagaaacgcgaccagttccgccgccgtcatatctgatgctgaacaagtgtgaaatcgtgcccgctcgccaaagcgcgcttttattgccgcctccagcgaggtatgcgtgtactgctcgccagactcaatcatcatgttgagcacttcgtgaccatgaatggaatccataacccctcctgaataaaactcgtagcctaatgtgtccgtgtacaagcgactttgcgctagcgcaggtttacggcggttgtccgcgtctccttccatattcgcttttatgcccggaactgtaaattttacagtacacccattgtaacgaccatttgacgaaaatagcgtaatgccttaccctgcgccgcggatatcaccgttctttgttaccggggtagtagaaagcgtgaaaaacagaactctgggcagtatttttatcgtggcaggcaccactatcggcgccgggatgctggcaatgccgctggcagcggctggcgttggtttcagcgtcacgctgggattgttgattggtctgtgggcgctgatgtgttataccgcgctactattactggaggtatatcaacacgttccggcggataccgggctgggctcgttggcaaaacgctatcttgggcgttacggacagtggcttacgggattcagtatgatgttcttaatgtatgcgctcactgccgcctacatttccggagccggagaattactggcatccagtattaataactggcttggcgccacgctctcgcccgctgccggagtactgctgttcacctttgttgccggtggggtggtatgtgtgggcacctcgctggtcgacctttttaaccgcttcctgtttagcgcaaagatcatttttctggtcatcatgcttgcgttgctcacgccacatattcataaagtaaatcttcttacgcttcctttacagcaggggctggcattgtccgccataccggtcattttcacctcgtttggttttcacggaagcgtaccgagtattgtgagttatatgaacggcaacattcgccggctgcgttgggtctttatgacgggtagcgccattccgctagtggcctatattttttggcagctcgccacgctgggaagtatcgactcgccgacattcagagggctactggccagccatgccgggttaaatggcctgctgcaggcgctcagagaagtggtcgcttcgccacatgtcgaactggcggtccacctgttcgccgatctggcgctggcgacctcttttctgggcgtagcgctaggattatttgattacctggccgatctattccagcgccgcagtacggtgtccggacgcctgcaaaccgggctgattacctttctgccgccgctggcgtttgcgcttttctacccacgtggatttgtgatggcattaggctatgccggcgtagcgctggcagtgctggcactactcatccctgccatgctggtctggcaatgccgtaaacagagccctcaggcgggatatcgtgtggcaggcggcacgccagcgctggcgctggtgtttatctgcggcattgtcgtgattggcgtccagttttcgatcgcactggggttcctgcccgatccaggttaacgccaggcaaagattaccgggcccggacgccgtccaggctcgataatcatcacgctatggccgtttacgagccattaatgcaggcagcactgcttaaattttttgccgctcccgcatggacaaggatcgttacgccccactttcacctctgcttttatcggcatctgtagcggcgtcgtgtgcggatgcgccatccaccaggcatgcagctcaagcgccgcgatacggatagcgtcaacgcttttatcgaacgcttccgggctcattttatccaacagcgcaaagttttcttccgtgccgtgtaaggcaatcgcttccagcgccggttttagcgtatccggcaagtcagaccagtcggacagcgacactccgcgcatgtaaccaaagcaccattcttcaacaatcgttaattcatggccatcaacttctcgcaggccaaacagcggctcgaactgttctggatagtcttcaagccgggcggctgtgtccgccatgtgctggaacaccagatccataaatcgcgtcatttctttttcagatgtccagcgcggtacgtacgcgggtcccccccatatcgcgaccagccactgttccgggtcgatgggacgcggagaacttagtaccgcagtaatcagaccgtccagctccgcgacatccaaaatggcctgatcggtattgtatttcgtcagcacatcatccagccattccagctcgttctcgtttaatggttccattttcataacgcttttcctcagtgatgacttccgcctgtaggcctcttacattgcagcggataaaaataatttttttgcaggcagttggatggcaaccatcaggggccagattaacacgaaatgaggaggattccggaagttaacgcacaaaaggaggatcagggcgcagattttccgccaggaagcgctcgccccacacaaaagcgagagatgggtttctcgctatattatactcatgctaacttataccaccgccgcggacagataaaaccgccctctcaaatagagcttattttcagtaaaaaagtgtttaatgagttcgtctaccgcttctctgtcagcagaaaaggttatttccataaacagcgtatcgtaccctattttgatattttttttcttacagtaaacacggatctcatcctgcacactcagcaacggcaggctaaatgtgtatagcggttgcggttcttttttcgccgctttctcaaaaactttagtgaccagatccccaagatcgcgctctgaccgggcaccgttattaaaatgcaataaattacgtctttttaccacccagcctccagccagataccgccaacaataactctcacttcaatgtgtgaggcacataatcacatccagaatcagctccagatagtatttcaaataaacagcccgcactatagcgcatacttttttcagacacagtttacagggatactctctttatatccacgcgcacggttgccttaatcatgtcttccgcgataacacagtttgtcaacctattctatataaccaagcttaaacagaaccttaccagccagtgatatcagctcaggactttcaggataaaaacgcagtaacggcaaaaataccgcctcaccgataatgctccggctattagcatggtttgggcgcaatccccagatattctgataagtcatcggcacgacctgcccattcatggttgtgttaccgatatacagcataatatgccctggaatatagaccagcgtagtaaacggttttccgtatctggtgagataatcgatccgcatttggggacttttatgactaagatcgaccacccgtccagcagcctctacctgcgcggatgaatgtctgggcaggaatatgccaaacggcattaacaggctgcggatttcggctgaacaatcattataaaagttaaaatttccccaaccgtagggggcgccgtacattgctttcattagcacggcgatattttccggcgtcattttccacggcatagccgtaaactcgttaccgcttagccagacccaatggataaacgcgcgaccgttgctgccgcgaactggcgccgcaatcaggaactggcccgcccgttgatgtcggaacggtaaaatagtgcccggtcgcccggtgaaataatagacgcctgcgacatggacagaaaccggcgcgttgataaatgcccccagttgcttatgagcaagcaaaacccactgtgttataaatttctgatccgtactggcaatatcttcactatgaacccagccagttaccgctggtgaaacgacatattgccagcgttggtctttgctcttcgtcagcgtatagaccggcgtaccgggacgcagcgaagacatttgtaaattatcaaacgggtacccctcgcccgcctgacggggatcgttaaagagcgggtcgtccgttggcagcgctctgactaaactttctctgaccataatacctcgccgggaggcatgatagatattgtcaatctgcgtatccgtattccctctaacctcctctttccagcgagaggtataaagtctgaagttttccccccaataagcactgccgtcgctaagaaactgcttaatactggcatcccgcgcctgtgctgcgttttttttcagcaatgcggtaatataaaaaccattccacggcgagtgcgcttcactgtccattccgaaataatgagattttagtgcgttaaagtagcgttgttgggtagcattatcaataaccggaatagtgtaatcagccgagtccggaggtatccatttatcaaccgactgtgaataatccgctaacggaaagcgtgtttttgtcgggtcaatatagctccctgtgaaaatttcatctttggctgttgatcggtaggtcgtctggtggcaagcggtgaggcacaatggtatcaataaaacggcccaggttttcttttgcatcatcatctccgtaaagcggggaaagcataatatagagactgaccaaaaccgccattcacgaaaacctgaaattatctgtagttgacctgttattaagacaatattgcaaaacgtgattaaagcatgatgcggatcacattaccttatgatgaatattagttcgctatctacctttaattaaactgtgcagaaaacaccctgaacagttatatactcgtttaatttgcataaatactccactgacccgcccctgtttttttcagacaatacatactgtagcgcgtcagttctactttttttatatactctgcaaagtcgttttcatcgacgtagccaataaaattacgcgcatcacatgtcgaagaggaaagctctcctggaaaagagtaggttacgattgcactctcaggctcatacaaaataaaaaaaagtagcaaagcgcaacctacaatcccaatattaatgaagctaataaataattttgcattatcggtatatttcactggcagacctactctctttaataaagcaggcataaaacatatcagcattttttatagagattaatggattttatcggctgatttacccgacgtttagtaattaccaggcataagttcttgcgggtcggtagcacataactgttgtactggcagaaatgccgctaccgatgttttttactgtgtatcgcgctggaaagttcacgctcgcggtcggcatacaaattgaaggcacaaaaaaaccacccgtaggtggtttcacgacactgcttattgctttgattattcttgtctttcccatggtacccggagcgggacttgaacccgcacagcgcgaacgccgagggattttaaatcccttgtgtctaccgattccaccatccgggctcgggaaaaattggaggcgcgttccggagtcgaaccggactagacggatttgcaatccgctacataaccgctttgttaacgcgccaaacttttttggcttttcagccagcatccgctttacgccaatgcttttaaactggagcgagaaacgagactcgaactcgcgaccccgaccttggcaaggtcgtgctctaccaactgagctattcccgcagtatcaagcaactttgttaatcacttgattttgttatcgtctggcaatcagtgctgccgttcgatgcgttgcattctacttacctgacgcactgagtcaacgatatttttcgtcactcacgatcgtttgctgaaatttgcggcgaaacgatcactgatcaagcaaatctccgcgtgcagcgctcaaatattgcaacatggaccacaatgttagcaccgctgcgacaaagaaaagcgcgatcccggcatactctacccagatattcggacgccacaagagccacgccagcgccaccatctgcgcggtagttttgactttaccgatccaggagaccgctacactactgcgtttgcccagctccgccatccattcacgcagagcagagataataatttcgcgggctatcatcgtcgccgcaggtaacgtcacccaccagctatgataatgctcggtgaccagcaccatggcgatcgccaccagcaccttgtcggcgacggggtcgaggaaagcgccgaaacgcgtactctggttccagcgtcgcgccagaaagccgtcaaaccagtcggtaatagcggcaatacagaaaatcagcgcgctgaccatcggcgcccaggcgaacggcaaataaaacaccacgacaaagaatggaatcaggatgacgcgaaacagcgtgagcaacgtagggatattaaattgcatagtgacgggtaactatctgttgtcagtgaaattacccctatgttgctacagtggcctcaatgtttcaacgaccagaagatcttttctgccagaccttgcgaaatacccggcacttttgcaatttcttctacgctggcgttacgtagtccttgcaaaccgcccatatatttcagcagcatctggcgacgtttaggcccaacgccttcaatagtttccagcgtactggtatttttaaccttcgcgcgttttttacggtgcccgccgatcgcgtgatcgtgcgactcatcgcgaatatgctgaataacatgcagcgccggcgagtccggcggcaggctaaacccctcgccttccggttcaaaaaagagtgtttccagaccggcctttctgtccgcgcctttggcgacgccaagcagcaaaggacgatgcttatcccaggggacatccagctcagcgaaaacggctttcgcctgggcgagctgcccttttccgccgtcgatcagaataacatccggaatcttactttcttctatggccttgccataacgccgacgtaacacctgattcatcgccgcgtagtcatcacccggcgtgatgcccgcgatattataacgacgatactcggcgcgtaacggcccgttagcgtcaaataccacacaggatgcgaccgtttgctcccccatggtatggctgatgtcaaaacattccatccgcttgatcgcaggaagttttaataccgccgccagcgcggtcaaacgctgcgtgatggtggactgctgcgagagtttagtgattaaggccgttgccgcgttggtccgcgccagcttgagataacgggcgcgatcgccgcgcggttttgtctggacatgaatacgccgtccggcaagttccgacaacgaatcggccagcagcgttttatcactcagattaaaatcgagcagtatctcgcccggtagcgtgcgcatctggctaccctgcaggtaaaactgcccgacaaaggtttccaccacttcgcccagttccgtaccaccaggtacttttggaaaatagctgcggctgcccagcaccttaccctggcgaataaacagcacatgcacacaggccatacccgcatcaaaagccacgccgataacgtcgagatcgtcgcccgcattggagacaaactgtttttccgtgacccggcgtaccgcctggatctgatcgcgaatacgcgccgcctcttcaaatgccagatcctggctggccttttccatccgggcaatcagctgtgttaagacctggtcgtccttaccggacaaaaacaaccggacatactccacctgttgcgcatactcctcctcgctgaccagtcctgcaacgcaggggcctaaacagcggccaatctgatattgcaggcaaggacgcgagcggttgcgatatacgctgttttcgcactggcggatagggaaaattttctgtaacagcgccagcgtttcccgcacggcatagccattaggaaatgggccgaagtactcgcctttcgcatgtttggcgccacggtgcatcgccagacgcggatgggtatcgccgctcagaaaaataaaaggataggatttatcatcacgcaacaacacgttgtaacgcggttgatacaacttgatgtaattatgctcaagcagcagcgcttccgtttcggtatgcgttaccgtgacatcaatgtgttgaatttgcgcaactagcgcttcggttttacgcgaagccaggttgctgcgaaagtagctggaaagacgctttttcaggtcttttgctttaccgacataaataaccgtaccgccggcgtcatacatacgatagacaccgggttggctggtaacggttttcaaaaacgcctttgcgtcaaatatttcactcactggcttgttaacgtctccgcattacacaggccatggcggattgccaggtgagtcagctcaacatcaccatgaatgtttaatttactgaacatacgatagcgatagctgttcaccgttttaggactgagattcagctgttctgaaatctcattgaccttctgacccttggtgatcatcagcataatctgcaactcgcgttcagacaaactggcgaacggcgtttccgtttttgcaggctcaatctgactgagcgccatctgctgagcgatatcggaggcgatataacgttgtccggaatacaccgaacgaatagcgctcaccacctcctgaggcgcagcgcctttgctgagatagccagctgcgccagcctgcatcactttggcgggcaacgggttctccgtatggacggtcagcatgatcactttgatatccgctgtcgagcgggcaattttacgcgtcgcctcaaggccgccaataccgggcatgttcatatccatcagcacgacgtcaacggcgttagtacggcaccattttaccgcatcctctccgcagcacgcttcaccgacaactttaatgccctttatatcttcaagaatgcgtcgtatccctgcgcgcaccagttcgtggtcatcaacaagaagaacgttgatcaaaggaatatctccagaatagggataacgctactgatagttaatcgtccttatattagctggttttatctcaactttgaaacgtaaaaaaacaccgggtattcgattttgctctcgtttttggaaattatgttgtacgtcatgtggcaactgccaacgttgtagccccttctggcggcgctgtcccgggctgatatttcataatggtgacaaaaatttcacgttccgctgtctaaacactaattagagaatcaactttgtaacaataattaacgagtgaaatacgcgtaataaacaaagaatgaagaaaatatatgcatcacgcggcaacgtttattttgtgggtaacccctccgctttttgatcaaaaaacaaccactgctatttttagcgtagcttatggtatactccgccgccttaacatctgctatcgcacattttcactgaaacataacgaggaaaataaatgagtacgcctgatttttccaccgctgagaataatcaagaactggctactgaagtcaactgcctgaaagccatgttaacgctgatgctgcaggcgatgggccaggccgatgcagggcgcgtgattcttaaaatggaaaaacagatcgcgcagatggatgatgaagcacaagcggcggtattttccagtacggttaagcaaattaaacaggcttaccgccagtagtaaaaaaccggctgttagcatcgctttcagccggtttcgcgtctggcgcgaagcatcgtcagcacgtcatatcagacctgtcgccgcagcgtagcaggcaatctgtgttttatttggcgcattgaatttcttctgcatatttttctgatggaagttaacggtattttcagaaatcgacagaataatggcgatctccgatgaggtcttcccttccgccgtccacttcagaatctctttctcacgtttactgaaacgcatttcaggcgccatcaccatgtcgtcttcaaatcttgtcagcgccgaaagactctcccgcgccagcagttgcaacctcagctccacttcgtcgtaggtaaacgaggagcagcgtaaactgctacgggagaaagataaaaagcccagcgcccggttcggcaacatcacacactgggttacgcctctgcgtaatccgaaacgctgggcggcatcccacatcgccttcgcttcatgaaatagcacgtcatcccaatgtaaatgaccctgcctgaaattttccggctttaataccggatcgatcgcgaaatagttttcggactggtaatgcgttacccacgccggaggataagtggtacgaagcgatattttaggccgggtaaaggggacgggatgacgaacacacagggcataataatcaaattccagccgctgtgtctgatattgcaattcagtataaacatcctctgctgccgccatctcctgaaagcgtaacaacattgcgcgtcgccaggtgaagaaatcattttcctgcatattttatggtcacgcctttgatattgataatcattattatgaatgacttaaattaacacataaatagtgtttatatataagaaatatcggacgaaacgtagaatacttgagcggcattacactttttggcttccgcctgagagcgaggttaataatctggcagaatgacttcataattattcattgcgctcgcccaaggcgcggctaattcgggcgagcgttgaaaaggcattatttcactaaaaatttctcaaggaactggcgggtacgcggatgctgaggatcggcgaacaaggttttcgccggcccctgctcgacgatttgcccctgatccataaatattgcccgatcagccacgtcacgcgcaaagctcatttcgtgagtaacgatcaccattgtgcgcttttcctgcgccagctggcgaatcgtattaagcacctcgccgactaattcaggatcaagcgccgacgtcggctcatcaaacagaatcacttccgggcgcatcgccagcgcgcgcgcaatcgccacgcgctgctgttgcccgcccgacaggcggcgcggataacgggactctttaccggccaacccgactttggctaacagttcccgcgccagcgccgtcgcctcggctttcggctctccctttacaatcaccggaccttcaatgatattttccagcacggtacgatgcgggaacaggttaaaactctgaaagacaaagccgacatgctggcgtagctggcgaatcaaccctttttgctggctgaatgggcgggcggtatcgatgataatatcgcccactttaatggtgcccgcttccggttgttccagcaggttaatacagcgtaataacgttgtcttccctgagccgctcgggccgataatggcgacgacttctccgggcttcacctcaaggtcaataccgtgcagcaccgtttgaccatgaaattttttgaccaggttggtaacttcgatcgcactcattttggctctctctcctggcggttaagctggttttcaaaatagttttgcagtgccgataagacggtcgccattacccagtagattaacgacgcggccagatacatggtaaacacctccagcgttcgcgaggtaattaactgcgcctggcggaacaactccggcacctgaatcgtcgcggcgagcgacgtatctttcaccaggctgataaagctgttgctcaacggcggaagcgcgacgcgagcggcctgcggcaaaatagcgcgacgtagcgtttgccacggcgtcatgccaatgctcgccgccgcttcccattgtcccttgtcgatagccgagatcgccgcgcgcagcgtctcggacgtgtaagccgcggtattgagcgataaaccaatcatcgccgccgggatagggtccagctcaataccaaattgcggcaggccgtaatagatcataaataactgggcgataagcggcgtaccgcgaaaaatcgagatataaaagcgcgccagccagcgaaccggccatagcggagacatccgcatcagcgccagcacaaatcccagcagcagaccaaaaaacataccgccaatactcagttgcagggtaaagacggcgcctttaagcaaatacggcagcgattcaataaccagttggatactttcttgcattcgcgttgattacctggaggttatacatgaggatggtaggcaaacagcgcaggcgccccaccggtgtgaataaagagaatcggcccgtcatcgttaaagcgtttctggctgatgccgtctatcagacccgccatcgctttaccggtatataccggatccagcagcaccccctccaggctcgccagcagtttcaccgcctccatccccgcgtcatttggcacgccgtaacccggggcaaaatagtcatcccataaatggatatccgccgtcgccgtcagcgccagctgaccggcaatagcctgctgcaaggcaatcactttgggtttctgctcggcgacagaacgtgaaacggtcacgccaatcagttcgacatccggcatcagatgttccagcccgacagctaacccggcgtgcgttccggcgctgccggaggccaccaccaccgaagagagcccgacgacctcttcacactgctgggcgatttccagggcgctctctacgtatcccattgcccccagcgcgctggaaccgccgaccggaatcacatagggcctgaacccttgcgcttcaatgcgcgtcgccagcgtttgcagctgcgcatccggatcggttagcgcatcgcacatctcaatttgcgtattaaataaatccagtaacaggcgattaccattcgtcaggtaattttccgcggtggtaccgattggattttccagcaaggcgacgcaatgcagtcccaatttggccgcgactgccgccgtctgacggacatggttcgactgaatcgcccctgcggttatcagcgtatccgccccttctcgcagcgcgtcggccaccaaaaactccagcttgcgcagtttattgccgcccattgcaatgggcgtaacgtcatcgcgcttaatgtaaatctcacggccaagataatcagacaatcgcggcaggtattcgagcggggtcggcgcgccgataaactccaggcgagggaagcgcgttaagtgatgtagtggcattgagcctccggtaacgttgtggtgtgttctttttattatgcacgttgatctaacggaaataaaaaaggcgccgattcacgcgcctccgtttgctgacatagtatgaggttgatattgcccggtggcgcactgcctgccgggcaacgtagaacattattgggtcacgtcagcgccaaaccatttttcagagagcgcttttaaggtgccatctttttgcatttccgcaatggcgttatctaccgccttcagcaagtcttcgttgcctttacgtaacgcaacgccggactcctgacgcgaaaacgcatcaccggtgacggccagcgtacctttggtttttttcaccagatccagcgccgccagacgatcgactaaaatcgcgtcaatacggcctacgcgcagatcctggtattttgtaggatcatcgtcataggtacggatatccacgccctgcacatgttgacgtagccactcttcatagttagtccccagcccaacgccgacttttttgccctgcagatcggcagccgttttgatcgtgccttcattgccttttttcaccagcgcctgaatgccggagacagtataaggcgtagagaaatcatattttttcttgcggacgtctgaaatcgtgacctggtttatcaccacatcaatacgtttagcgtccagcgacgccagcattccgtcccatttggtcggcttcaacgacgctttaacgcccagatgttttgccaacgcctcggcgaaatcgacttcaaaaccggttaatttgccgtcttcgccctgaaagctaaacggcggataggtaccttccagccctaccagcagcgtgccgcgttctttaactttgttcagcaaaccctcatcggcaaagctcttcgcgctcattcccgccaccagcgctacagccattactcccatcagtgcctgacgtcccagcagtgctaatttcatagtaaccccgaatattgccgttaatgaccatagactgtgtcccgccatggcgcatcgtcacgtctcgcgaacctttgggggactcagcctaatgtagaaggtttgccacgtttcaccaacacgactctgctacatcttatgcttttttaatatatatcagaactggcggtaaagggggatttctgtctgggcgcaatctgctgatgcgctttatattgctggtatttacgcagtgcgatacggtaattattggtgctggtttccggcaaccatggcgccaggctttcatcgagaaaaccgtcctgcagcagatcgtgggaaatgttttgctcgctgaggtaattgccaaggcgtcgtaaacgcacgacatattcccgcaccgtgccatggctcatctcggtttgttcaaacaaatactgcttgaaaccgataatatcgaaaaaatcactctgctttttgcagtgcaaatcgccgcaaaagcgacacagcgccacccactccttctgctcccgctgccaggcagcgtcgtcaagtagcatatccagctgtgaaatagcgattttattaacgatcttgccacggcgaaccagcgtaatgcggtcgagcagtttgtgacaatgcgcgcaatgcgtctggctgtgtttaaagtctttaagatagcggctcaaaggccgccttttaggttgctgcaccgtcatgagaactcctggtagtctatacgttgtgcggcacttttcgggtgcgatcatgcgcgacctataacttacccagtttggtgcgtaatcgtttgatggcctgactatgcaactggctgacccgcgattcgccgacttccagtaccgcgccaatctctttgagattgagctcttcctggtaatacagcgttaacaccagttgctcgcgttccggcagcgattcaatcgcatccattacccgctgtcgcaggtcgccctccagcagttgatgtaacgggttttcctgttgatgttcttcagtcaccagttcgatgctatcgccatgctcttcccgccactcatcgtaagagaaaagttggctgttgttggtatcgagcaacatctgacgatactccgcaacagggatgccaagacgttccgccacttcggtttccgtcgcattacgccccagttcctgctccagttgtcccatcgcctgcgccacttcgcgggcattacgccggacgctacgcggcacccaatcgcggctgcgtaattcatccagcatcgccccacgaatacgctgcactgcgtaagtggtaaatgccgttccttgcaaagcgtcatatcggtcgaccgcatttaataacccgatgccgcccgcttgtagcagatcgtccagttccacgctcgccggcaatcgcacctgcaggcgcaatgcttcgtgacgcaccagcggtacataacgctgccacagcgagtgtttatccattacaccttcagcggtatacagtgaattcacgataaacagccctgcgttaaatgagttatcggcatgattatccgtttctacagagggttctatcgaaggaataaggctataaaagaagggttatttcacttatgtaacctgtagcgcctttttagcggctaaaagagcagaataaaatcagccagatagaataaatatcctccggcatagccggaggtttttcagatgcgcctataaggctctcttaccagccgcgccctaacaggcgcatacgatctgacatttgcatcaaacttcgttacttacggcccgtaaacgggctgcccggatacgggatcgataattgctcacccattttatcctcttcaagctggtgctttatgtagtcctgtatcttcgccgtgttcttacccaccgtatcgacatagtaccctctgcaccagaactccctgttcctgtatttgaattttagatccccaaactgctcgtaaagcatcagactacttttacccttcagatatcccatgaaactcgacacactcatcttcggcgggatctccagaagcatgtgaatatgatctgcacaacattctgcttccagaattcgtacgtttttccattcacacaattttcttaatatgctgcctactgccctacgcttctctccatagaacgcttgtcttcggtatttgggcgcgaaaactatgtgatatttacagttccatcgggtgtgcgctaagctcttttcgtcccccattgggacccccttttgatttcttgttgaacttttgcagttgccagaccgcaagatgttttaacaaatcaaaaggggttttaataactggcttaaagctgaaagctttccggaacccccagcctagctgggggttttccatagacaataaacgggatgcgcaaaagcccaccccgaacaaaactatgtcagaagatgaatcatcgacagatcgtcgccagtacgcaccgtttctatatggcgatgaaaattcttcgccacctcgctgttatgctggctgcgggagtgaaaactatacacaatattggtaacgtcatcccactctatacgcccgcgctcatgcacgctggctgccgttaatagcttaataaaggcatattccgccacgataatatacagcgcgcgtaacgggtcgacattcggctggttggggaaattattttcccaaattttatagagaattaaatttctgaaggcccagttcttctgctgctcattcgcctgtaaacagcgcgctaatgaggactcaatatcgctaaccttctgctccattgaaacgccctcttccgccgtcagcacccgcagaagacactggatgtagtgatcgaggataacactgccacgattaagcgggagcgagcggaaatagtcctgcatctgcaataccagcgaggtttttaccttgctatccggcgcgatattcattaactcctgcgccagcacgccggtctgcaactgttcaagtaacgcggcatacacctgttccagttcgcccagcgcggcatcatcaattttggcaaatttctgtgcatacatgacgaatttaatcaacgcatagagcgcggcttccgtactgctgttggcatggttgatcagactcaggcaaaacagattgagtaacttttgctgcgctgggaataacggcgcagtattgaatgtctgctgaatgattgttttttcgctgagtgccattgcgtcaggatcgtttaaaatgcgggacgtcacctccgggcaggcaagactcagagagttacgcacctcatttttataggtatgatgcgcccgcgggaaagaggaacaggtatgacttaatgcctttgcgcctaacgttttttgtacccggcacagacggtcctcatccagataagggcaattccccagcgccgaaggcagcttaatttcgccccagtggctgttgttctttttcagcaggataatatggtcttgcgcgatggtacgaatcgtcgtgtctttactggcgagatattttttaaccgtcgtcttatccagcgtgattttccagcccttacaacagtggtcgcgacaggccgagccagaacaggaaaagcgggtgacaaaggcaggttcagtgacggtgatttctttcattacacaggctccggaattaaaaaaggcagctttcgctgccttgattgtgtaccacgtgtcggtgaatcaatcgccggattaacgcagtaaagagaggacgttttgcggaacctggttcgcctgcgccagaacggaggtaccggcctgctgcagaatctgcgcgcgagacatgttggaaacttcggtcgcgtagtcggaatcttcgatacggctacgggcagaagtcaggttgtttacggtgttgcccaggttggtaatagcggagttgaaacggttctgtaccgcacccaggtcagaacgtaacgtgtcaacctgtgccaaagcagcatcaattttctgcagcgggttttcggtggttgtagcagccgcttccgccagatcaggctgtgctttaaagttgtgaccttcggctttacttgcagcgtaagttttaccaccaatagaaacaacttcggttttgccgtctgcgccacccagtttgtttagtgcagttttggatgtaccgtcatctgcagtgtatttcgtagtattaatacttatggaaccatctttattttgagttgcagaatagtaatcatcgcctaccttaactgctaaaccaccatcaatagttttaccgttattatcagtataagacatcttaacaacagatgctgtgccggtaacacctgctgctgtcaatgcggctttagcctctgtcaaatcagcatttgcaacttgtacatttttcacatcctcagttgctgtcgcaggtagtccacctgtaagcggggaagtcgcaccgccagcaagagtcacctcaccgttcgtcttatcaacggaaacttcataatagccatctttaccagttccccccgtaacggtaactttggcgtaatattttccagtcgtatcatcaaattttaaatcgccatcaattttctggtcagtaccaccaagaccagtagccgaggctttaaaagtactattgtctaaagcaatcgtagtatcggcatatcctgtaacagttgcagccgtatcgctgaccttatatttttgttgcacattcagcgtatccagacccagggtctgagagttgatctgcttcagatcgatatcgatagtttcaccgtcgttggcaccaacctggatggtcagggtgttgtcctgcgccaggactttcacgccgttgaactgagtctggccggatacacggtcgatttcgttcaggcgctgggtgatttcagcctggatggagtcgaggtcagactgggagttggtgctgttagcagactgaaccgccagttcacgcacacgctgcaggttgttgttgatttcgttcagcgcgccttcagtggtctgcgcaatggagataccgtcgttagcgttacgggaagcctgagtcagacctttgatgttcgcggtaaaacggttagcaatcgcctgacctgccgcatcgtctttcgcgctgttgatacgcagaccggaagacagacgctcgatagcggtgcccagagcggactgggatttgttcaggttattctgggtcaacagcgacaggctgtttgtattaatgacttgtgccatgatcttttccttatcaattacaacttgatgttattgggctgttgcccacggtttctcaccgtaacccttgtatcggcacctgaatttcgaactttagaaaatttttcacttcccccgatctttttcttaggcggcgaaatagccgctttatgcatcattattccgcgcattatttttgcaaaattatcattaaactttgcctccagattgccgataacgcgcttaactactgtttgcaatcaaaaaggaagaaggcatggcttcaatttcatcattaggtgtgggatcaaacttaccgttagaccagttgttgacagacctgacaaagaacgaaaaaggacgcttaacgccaattaccaaacagcagagcgcgaattcggcaaagctaaccgcctatggcacattgaaaagcgcattagaaaaattccagacggcaaataccgcgttaaataaagcggatttatttaagtctaccgtggcgtccagcaccactgaagatctcaaagtcagtactaccgctggcgctgccgcagggacttataagattaacgtaacccagcttgccgccgcacagtcgctggcgacaaaaaccaccttcgcgaccaccaaagagcagttgggcgatacgtcggtcacgtcccggacaattaaaattgaacagccgggacgtaaagagccgctggaaattaagctggataaaggcgacacctccatggaggcgatccgtgacgccatcaatgacgccgacagcggtatcgccgccagtatcgttaaggtcaaagagaacgaattccagttggtgcttaccgccaatagcggtaccgacaatacgatgaagatcacggtggaaggcgatacaaaacttaacgatctactcgcttatgacagcaccaccaataccggcaatatgcaagagctggtgaaagcagaaaacgcgaagctgaacgtaaacggcatcgacattgagcgtcagagcaataccgtaaccgacgcccctcagggaattacgctcaccctgaccaagaaagtgaccgacgcgaccgtgacggtaacgaaagatgataccaaggcgaaagaggcgattaaatcctgggtggatgcctataactcgctggtggatacctttagctcgttaaccaaatataccgccgttgagccgggcgaagaagccagcgataaaaacggcgcgctgttaggcgatagtgtggttcgtactatccagaccgggattcgggcacaatttgccaatagcggcagtaattctgcgttcaaaacaatggcggaaattggcatcacccaggatgggacttccggcaaactgaagattgatgatgataagctgaccaaagtactgaaagataacacagccgcagcgcgtgagctgctggtaggcgatggtaaagaaacgggtatcaccaccaaaattgccaccgaagtgaaaagttatctggcggatgacggcattattgataatgcgcaggacaacgttaacgccacgctgaaaagcctgacaaaacagtacctgtccgttagcaacagcatcgatgaaaccgttgcccgttacaaggcccagtttacccaactggataccatgatgagtaagctgaataacaccagtagttatttgacccagcaatttacagctatgaacaagtcctgataacagaggtcaccatgtacaccgcgagcggtatcaaagcttatgcgcaagtcagcgtggaaagcgccgtgatgagcgccagcccgcatcagttgattgaaatgttgtttgatggcgcgaatagcgctctggtgcgcgctcgcctgtttttagaacaaggcgatgttgtcgcgaaaggtgaagcgttaagcaaagccatcaatattatcgataacgggctgaaagccggcctcgatcaggaaaaaggcggtgagattgcgacgaatctttccgagctatacgactatatgattcgccgtttactgcaggctaatttgcgtaacgacgctcaggccatcgaagaagtggaagggttactcagcaatattgcagaagcctggaagcagatttcaccgaaagcatctttccaggagtctcgttaatgacctcaaccgtggagtttatcaaccgttggcagcgtattgcgctgctcagtcaatcgctgcttgaacttgcgcagcgaggtgaatgggatctcttactgcaacaagaggtctcctatctgcaaagtattgaaacggtgatggaaaagcaaactccaccgggcattacgcgaagtattcaggatatggtcgccggatacatcaaacaaacgctggacaatgagcagctcctgaaagggctgctgcaacagcgactggatgaactgagtagtttgatcggacaatccacccgccaaaaatcactcaacaacgcgtatggccgtctttccggtatgttactcgtgccagatgcgcctggcgcctcataatattttcccgtctcgtatgaaaattcttccatactccagaggtcggctaaacgacttctggagcacggaagatgaaaaaccccacgttattgcagtacttccactggtattatcccgacggcggtaaactctggtctgagctggcggaacgtgctgatgggctgaatgatatcggtatcaatatggtctggctaccgcccgcctgtaaaggcgcctccggcggctattccgtaggctatgatacctacgacctgtttgacctcggcgaatttgaccaaaaaggaactatcgcgacaaagtacggcgataaacgccagttactgacggcgatagacgcgctcaaaaaaaataatattgcggtgctgctcgacgtcgtcgtgaaccacaaaatgggcgcagacgaaaaagaacgtattcgcgttcagcgcgtgaatcaggatgaccgcacgcaaatcgatgacaacatcattgaatgcgaaggctggacgcgctacaccttccctgcccgcgcgggccagtattccaactttatttgggactatcactgtttcagcggcattgatcacatcgagaatcccgacgaagacggcatttttaagatcgtcaatgactataccggcgatggctggaacgatcaggttgatgatgagatgggtaatttcgactatctgatgggtgaaaatatcgattttcgcaatcatgcggttacggaagagattaaatattgggctcgttgggtcatggaacaaacccactgtgacggctttcgcctggacgcggtaaaacatatacccgcctggttttataaagaatggattgagcatgtacaggcggttgcgccaaaaccgctgtttattgtcgcagaatactggtcgcatgaagtggataaactgcaaacgtacatcgatcaggtcgacgggaaaaccatgctgttcgacgcgccgttgcagatgaaatttcacgaggcctcgcgccagggcgcggagtatgacatgcgccacattttcaccggcacgctggtagaagccgacccttttcatgcggtgacgctggtcgctaaccacgatacacaaccgttacaggcgctggaagcgccggtagaaccctggttcaaaccattggcctatgcgctgatcctgcttcgtgaaaacggcgtgccgtcagtgttttatcccgatttatacggcgccagctatgaggatagcggcgaaaatggcgagacctgtcgggtcgacatgccggtgattaaccaactggatcggctgatcctcgctcgtcagcgttttgcgcacggtatacaaacactctttttcgatcatcctaactgtatcgcctttagtcgcagcggtactgaagagaatccaggctgtgtggtcgtactttccaatggcgacgacggtgaaaaaaccctcctgctcggcgacaattacgctaacaagacctggcgtgattttctgggaaaccgggatgagtatgttgtaactaatgatcaaggcgaagcgacgttcttctgcaacgcaggcagcgtcagcgtgtgggtcattgaggacgtgtgatgagcgttcccggcggcagagcgctgccgggaagcgaaattacggcagcggcgtcggcagcggcgtcggcagcggcgttttttctaacgcggcggcgcactccggcgtcggacgagcgacccgttgcagcgtcatgccatcatattccagggtattcccgtcgcgctcaatctcatagagctcacgcttaaccgtaacattggttaagtcatcggagagcatggtcagcttgcccggcagagcaataacgcgctgccactggcggcagtccagcgtatcgccttctttagtcaccaccaggctggcgatagcttcagggctcaccagcttacgttgcgggccttttgactgccagtacccttccagaccggccggcgcgggcgttttcaccacatcattatagttttccacctcggcgcatccggccagaaccagcaatgcgccaacgatcgctacttttttcatcattcatcctgcatcagaagaaagaagaattgtggcattaaagccctgacgccgccagcctttccaggcgctggccgcaatttgatccagtcggtattaccgcttattaggtgtaggcaaattctgtgatcggtgtagtatgcgcacttcttgtttcacaccttctgagttcagaggctaaacacatgtcatggcaacacttcaagcaaacctggttaattaaattctgggcgccggcccctgcggtgatcgcagccggtattctctctacctactattttggcatcaccggcacgttttgggccgtgacgggcgaatttacccgctggggcgggcaaattttgcagctttttggcgttcatgccgaacagtggggctactacaagctgattcatctggaaggtacgccgctgacgcgtatcgacggcatgatgatcctcggcatgttcggcggctgtttcgccgcggcgctgtgggccaacaacgtaaaactgcgtatgccgcgcagccgaatccgtatcgtacaggcggtggccggaggcattatcgctggcttcggcgcgcgtctggcgatggggtgtaacctggccgccttttttaccgggatcccgcagttctccctacacgcgtggttctttgcgctggcgaccgctatcggctcctggttcggcgcccgctttacgttgctgccgatatttcgcataccggtgaaaatgcagaaggtctccgcggcttcgccactgacgcagaaaccggatcaggcaagacggcgtttcaggctcggtatgctggtctttatcggcatgattggctgggcgttattaacggcaatgcatcagccgaaactggggctggcgatgctgttcggcgtcgggtttgggctgctgatcgaacgcgcgcaaatctgctttacctcggcctttcgcgatctgtggatctccggacgcgcccatatggcgaaagcgattattttcggcatggcggtcagcgccattggtattttcagctacgtgcagttgggcgttgcacctaaaattatgtgggctggcccgaatgcggtcattggcggactgctgttcggttttggcatcgtgctggcgggcggctgcgaaaccggctggatgtaccgcgccgtagaaggccaggtgcattactggtgggtaggcctcggcaatgtcatcggttcgaccatcctggcttactactgggatgatttcgcgcccgcgctggcgaccagttgggataaagttaacctgctgaatacctttggtccgctgggcggtctgctggtcacctatctgttgttatttaccgcgctgatgttaatcatcggctgggaaaaacgttttttccgccgtgcggggctgacgcctgctaaggaatctgtatgaaaaatatcgtccctgattaccgtctggatatggttggcgaaccttgcccgtacccggcggtcgccactctggaagcgatgccgcagctaaaaaaaggtgagatcctggaagtggtgagcgactgtccgcaatccattaataatattccactggatgcgcgcaatcacggctatacggtgctggatatccaacaggatggcccgacaattcgttatctgattcaaaaataagcgcatactcccgctgtacgttacggcgggagaccttttacggcataaccggcaaaaatctacaacgcataaaagaaatcagacaaggtcgtcttgtgcgccgtggcataaatctattatataacgtataccgttttaattttgtctgagccgatgaaaaatccagggttattttaatcaaaacataaaacaattattattttccgtctacgccataaaagactatcaggtatttatatttttactcactgacatcatcaggtgatgatttatttatgcacagcagaagccaaaaaaatgataaaaattattttcatctccattattggagtcgtctgtcttgccgctgcccgttattcacccgtcacagtggtcaatgcacatccgagcgccattgcccgctgtctcgctgataatctgtccccgtatgggtatatactggatctccatgaaacagatattccaggcattaataaagaatttaccgtgtattatcgcaacggcgcatatattgcaggaacattctggattgcaaactcaatgacaatagcatcagaacgaatagtaggaatgaatggcgttagtaaacaggcgtaccctatttttaataaatccctgcaacaatgtgcaacccgcttatcaataaaatgagcgcgcctcgcaaaaataagcccacataatcacgcactggttgcatgggcgtcgcgtcccccgccgctgacgtaggtaagcgcccgggagttcgctgcggatgtgttgtcagccctggcttaaacctgcatggacatgacttcctgatacgcggcgaccagcttgttgcgcacctgaatccccatttgcatagagacggacgctttttgcatatcggccatcacgtcattaagcgcaatgcccggctcacccagagtgaatttttccgcctgaacgcgcgccgccgcttgtctgtcgctaatacgatccagcgcagcatgtagctggccggcaaaactcaccgtcgactgcgagtgcgtgtcttgcccgcgcgcggccatcgccgtcgcctgtaactggctaataaccccttcaatcccctgtattgctgccatgctattcccctggatgattttttacgcagcagagattaccagtttgtcaataagataaaggcgttaaataacgataaaaaacctcggtttttagcgcatagaaaaattcgaaaccacaaataatgagaccgtcaatttttcgagtttgctgacccgggagtgagtcttgttccactttgcaaaaaacgccgtccacgatcagtcacgaggtgcgagatgagtgcgactgcatcgactgcaacccaacctaaacctctcgagtggcttaatcgcctacgcgcgaatccccgaattccgttaattgtggcgggttccgctgccgtggcgatcgtcgttgcgatggtgctgtgggccaaaacgcccgattaccgcacgctatttagcaacctttccgatcaggacggcggcgcgatcgtcgcgcagttgacccagatgaatatcccctatcgctttgccaatggcagcggcgcgattgaagtgcccgccgacaaagtgcatgaactgcgtctgcgtctggcgcagcaggggctgcctaaaggcggcgcggtaggctttgaactgcttgatcaggaaaaattcggtatcagccagttcagcgagcaggtgaattatcagcgcgcgctggaaggtgaactggcccggacgatcgagacgctggggccggtaaaaagcgcccgcgttcacctggcgatgccaaagccgtcgctatttgtgcgggaacaaaaatccccttccgcctccgtcaccgtcacactggaaccgggacgggcgctggatgaaggacaaattagcgccgtggtacatctggtttccagcgctgtcgccggtttgccgccaggaaacgtcactctggtcgatcaatccggtcatctgctcacgcaatccaataccagcggtcgcgaccttaatgacgcgcaattaaaatttgctaatgatgtggaaagccgtatccaacgccgtatcgaagccattctgtcgcctatcgtcgggaacggtaatgttcacgctcaggtaaccgcccagttggattttgccaataaagagcagacggaagagcactacagcccgaacggcgatgcgtcgaaggccactctgcgttcacgtcagttgaatattagcgaacaggtaggcgcgggctatcccggcggcgtgcctggcgcgctgtcgaaccaaccagcgccgcctaacgaggcgccgatcgccacgccgccgaccaatcaacaaaacgcgcagaatacgccacaaaccagcaccagtaccaacagtaacagtgctggcccgcgtagtacacagcgtaatgaaaccagtaactacgaagtggaccgcaccattcgtcacaccaaaatgaatgtgggcgatattgagcgtctctccgtggccgtcgtggtgaattacaaaacgctggcggatggcaaaccgctgccattgaccgccgatcagatgaaacagatcgaggatttaacccgtgaagcgatgggtttttctgataaacgcggcgatacgctaaatgtggtgaattcaccgtttagcgcagtggataacaccggcggcgaactgcccttctggcaacagcagtcctttatcgatcagttgctcgcggcaggtcgctggttgctggtgctggtggtggcctggattctgtggcgcaaagcggtacgtccgcagttgacgcgccgcgttgaagaagcgaaagcggcgcaggaacaggcgcaggttcgccaggaaaccgaagaagccgtggaagtacgccttagcaaagacgagcagctccagcaacgccgggctaaccagcgtctgggcgctgaggtgatgagccagcgtattcgcgaaatgtcagacaacgatccgcgcgtggtggcgctggtcattcgccagtggatgagtaacgatcatgagtaatcttagcggtaccgataaaagcgtcattttgttgatgaccattggcgaagaccgggcggcagaggtgtttaaacacctctccacccgcgaagtacaggcgttaagtacggcgatggctaacgtgcgtcagatctccaacaaacaactgacggacgtactatcagagtttgagcaagaagcggagcagttcgccgcgctgaatatcaacgccaacgaatacctgcgctccgtactggttaaagcgctgggcgaagaacgcgcctccagcctgctggaagatattctggaaacgcgcgataccaccagcggtatcgaaacgctcaactttatggaaccgcagagtgccgccgacctgattcgcgacgaacacccgcagattatcgccaccattctggtccacctcaaacgcagtcaggccgccgatattctggcgctgtttgacgagcgtctgcgtcatgatgtgatgctgcgtatcgcgacatttggcggcgtacagccggcggcgctggcggagttgaccgaagtgctgaatggcctgctcgatggtcagaacctgaaacgcagcaaaatgggtggcgtaagaaccgcggcggaaattatcaacctgatgaaaacgcagcaggaagaagcggttattaccgctgtgcgcgaattcgacggcgaactggcgcagaaaatcatcgacgagatgttcctgttcgaaaatctggtggatgtggacgatcgcagtatccagcgtctgctgcaggaagtggattccgaatcgctgctgatcgctctgaaaggcgccgaaccgccattacgcgagaagttcctgcgcaatatgtcccagcgcgccgccgatatcctgcgcgacgaccttgccaaccgtggcccggttcgtctgtctcaggtggaaaacgagcagaaagcgattctgcttattgtgcgtcgtctggcggaaaccggcgaaatggtgattggcagcggcgaggatacctatgtctaatgaattgccgtggcaagtctggacccccgacgatctcgccccgccgccagaaacttttgtgccggttgaggctgataacgtgaccttgacagaagatacgccggagcccgaactcactgccgaacagcagctggagcaggagctggcgcagctaaaaatacaggcccatgaacaaggttataacgccgggctggcggagggacggcaaaaaggacacgcgcagggataccaggaagggttagcgcaggggctggagcaaggacaagcccaggcgcagacgcagcaggcgccgattcatgcccgtatgcagcagttagtgagcgagtttcagaacacgcttgacgcgctcgatagcgttatcgcctcacggctgatgcaaatggccctggaggccgcacgtcaggtcatcggccaaacgccggcggtggacaactcagcgctgattaaacagatccaacaactgttgcagcaagagccgctctttagcggcaagccgcagttgcgcgtgcatccggacgacttacagcgggtggaagagatgctgggcgccacgctcagtcttcacggatggcggttacgcggcgatccaacgttgcatcacggcgggtgtaaagtctctgccgatgagggcgatctggacgccagcgtcgccactcgctggcaagagttgtgtcgcctggcggcgccgggagtgctctgatgaccacgcgcctgacccgctggcttaccgcgctcgacaactttgaagccaaaatggcgttattgccggcggtgcgtcgttatggacgtttaacccgcgccactggcctggtactggaggccaccggtctccagcttccgctgggcgccacctgcattattgagcgccaggacggccctgaaaccaaagaggtggaatcagaagtcgtcggttttaacggccagcgtctgtttctaatgccgctggaagaggtcgaaggcattctgcccggtgcccgcgtttacgcccgtaacgggcatggcgacggtctgcaaagcggcaaacagttaccgctcggcccggccctgcttggtcgggtgctggatggcggcggtaaaccgctcgacggactgcctgcgccggatacgctggaaaccggcgcgttaatcacgccgccgtttaacccgctacagcgaacgccaatcgaacatgtgctggataccggcgtacgcgctatcaacgcgttgttaaccgtagggcgcggtcagcgtatgggactctttgccggttccggcgttggtaaatcggttctgcttggcatgatggcgcgctacacgcgggcggacgtgattgtcgtgggacttatcggcgaacgtggccgcgaagttaaagattttatcgaaaatattctcggccccgacggtcgcgcgcgttcggtggtgatcgccgccccggcggatgtctcgccgctgctgcgaatgcagggcgccgcctatgccacccgcatcgccgaagactttcgcgatcgcggacagcatgtgttgctgattatggattcgctgacgcgctatgcaatggcgcagcgtgagattgcgctggcaatcggcgaaccgccagccaccaaaggttatccgccctcggtgttcgcaaagctgccggcgctggtcgagcgtgccggtaatggcatccacggcggtggctctatcaccgcgttttataccgtgttgaccgagggggacgaccaacaagatcccattgccgactcggcacgcgcaatcctcgacgggcacattgtcttgtcccgccgtctggcggaggccgggcactatccggccattgatatcgaggcgtcaatcagccgggcgatgaccgcgctcattaccgagcagcactatgcgcgggtacggctatttaaacagttgctttccagtttccagcgtaaccgcgatctggtcagcgtcggcgcctatgccaaaggcagcgatccgatgctcgataaagccattaccttatggccgcaactggaagcgtttttacagcaaggcatttttgaacgggccgactgggaggactctctgcaggcgctcgatttaattttcccgacggtgtgataaagcaggagggcgacgatcatggcacaacatggcgctctggaaacactcaaagatctggccgaaaaagaggtagatgacgcggcgcgtttactgggcgaaatgcgtcgcggctgccaacaggcggaagaacagctcaaaatgctgatcgattatcagaatgagtatcgcagtaatttgaacaccgatatgggcaacggcatcgccagtaatcgctggatcaactatcagcagtttattcagacactggaaaaggcgatagagcagcatcgcctccagcttacgcagtggacgcaaaaagtcgacctggcgctgaagagctggcgtgagaaaaagcagcgacttcaggcctggcaaaccttacaggaccgacaaaccgcggcagcgctgttagctgaaaaccgcatggatcagaaaaagatggatgaatttgctcagcgtgcagcaatgaggaaacccgaatgatcaccctgccccaactgatcaccaccgataccgacatgaccgcgggtctgacgtcaggaaaaaccaccggttcagccgaggactttctggcgctcctggcgggcgcgttaggcgcagacggcgcacagggcaaagacgcccgcatcacgctggccgatttacaggcggcaggcggcaagttatcgaaagagctactgacccaacatggcgagccgggccaggcggtgaagcttgccgacctgctggcgcaaaaagcgaatgcgacggatgaaacgcttaccgatctgacacaagcgcagcatctactgtctacgctaacgccatcgttgaaaaccagcgctctggccgcactgagtaagacggcgcagcatgatgagaaaacgcccgcgctgagcgatgaggatcttgccagtctgagcgccttattcgccatgctgcccggacaacctgtcgcgacgcctgtcgccggagaaacgccggctgaaaatcacatcgccttgccgtcactgttacgcggcgacatgccatcggcgccgcaggaagagacacatacgctctcttttagcgagcatgaaaaagggaaaaccgaggcgtcgcttgcgcgcgccagcgacgatcgcgccacggggccagcactgacgccgctggtagtcgctgccgccgcgaccagcgcgaaagtggaggtggatagcccgcccgcgccagtaacgcatggcgcggcaatgccgacgctcagcagcgccacggcgcaaccgctacctgtcgcctcagccccggtactcagcgcgccgttaggcagccatgaatggcagcaaacgttcagtcagcaggtcatgttatttacgcgtcagggacagcaaagcgcgcagcttcgattgcatccggaagagttaggtcaggtgcatatttcgctcaagctggatgacaatcaggcgcagctccagatggtatcgccgcacagccatgtccgcgccgcgctggaagccgccctgcccatgttgcgcacccagttggcggaaagcggcattcagttgggacaaagcagtatcagtagcgaaagctttgccggacagcagcagtcttcgtcgcaacaacagtcttcccgcgcccaacacacggacgcgtttggcgctgaagatgacatagcgttagcggcgccggcctcgcttcaggccgccgcgcgcggcaatggcgcagtggatatcttcgcctaacgccagaggtagcatgattatccgcgtcttttccacgctttgtcgtggacaggacacgggataatcagccaataagcagtaccgaaacaggaagcccgtatcagatgactgactccgcgattaacaaaaagagcaaacgctcgatttggatacctttgctggtgttgattaccctcgccgcctgcgcgaccgccggttatagctactggcgtatgcagcagcaaccgaccacgaacgctaaagcggaaccggctccgccgcccgcgccggtattttttgcgctggatacgtttaccgtcaatctgggcgatgcggatcgcgtgttgtatatcggcgtgaccctgcgtctgaaagacgaagcgacgcgcgcgcgattaaatgaatatctgccggaagtgcgcagccgtctgctgttgttgttttcccgtcagaatgccgccgagctctcaacagaagctggcaaacaaaaactgattgccgccattaaagagacactggccgcgccgctcgttgccggacaaccaaaacaggtcgtcactgacgtgctttatacagcttttattctgcggtaacgatatgggcgatagtattctttctcaggctgaaatcgatgcgctgttgaacggcgacagcgacaccaaagacgaacccactcccggtatcgcaagcgatagcgatattcgcccttacgatcccaatacccagcgtcgcgtcgtgcgtgaacgcttgcaggcgctggagattattaacgagcgtttcgcacgccagttccggatgggattatttaacctgctgcgccgcagcccggatattaccgtgggtgccatacgtattcagccgtatcacgaatttgcgcgtaacctgccggtaccgaccaacctgaacctgatccacctgaagccgctacgcggcaccgggctggtggtgttctcgccgagtctggtgtttattgccgtcgataacctgttcggcggcgacggccgttttccgaccaaagtcgagggccgcgagtttacccatacggaacagcgtgtcatcaaccgtatgctgaaactggcgctggaaggctatagcgacgcatggaaagccattaatccgctggaagtggagtatgtgcgttccgaaatgcaggtgaaatttaccaatatcaccacctcgccgaacgatatcgtcgtcaatacgccgtttcatgtggagatcggcaatctgaccggtgaatttaacatctgtctgccatttagcatgatcgagccgctgcgtgagctgctggtgaatccgccgctggaaaactcgcgccatgaagatcagaactggcgtgataacctggtgcgccaggttcagcactctgaactggagctggtggccaattttgccgatattccgttacgtctttcccagattttgaagctgaaacccggcgatgtactgccgattgaaaaacccgaccgcattattgctcatgtggacggcgttccggtactcaccagccaatatggcaccgtaaacggacagtatgcgctacgcgtagaacatttgatcaacccaattttgaattcgctgaatgaggaacagcccaaatgagtgacatgaataatccgtccgatgagaatactggcgcattggatgatctgtgggctgacgcgttaaacgagcaaaaagcgaccaccactaaaagcgccgccgacgcggttttccaacagcttggcggcggcgatgtcagcggtgctatgcaggatatcgatctgattatggatatcccggtcaaactgaccgtagagctgggccgcacgcgaatgaccattaaagaactgctgcgtctgacgcaggggtcggtcgtcgcgctggacgggctggcgggcgagccgctggatatcctgattaatggctacctgattgcccagggtgaagtggtcgtcgtggcggataaatacggcgtacgtatcaccgatattattacgccatccgagcgtatgcgtcgtttgagtcgttaatgatgaagacagaagccacggtttctcagcccaccgcgccagccggatcgccgctcatgcaggtgagcggcgcattaattggcattattgcgctcattctggcggcggcctgggtgattaagcgtatgggattcgcgccaaaaggaaatagcgtccggggactgaaggtgtcagccagcgcctcgcttggcccgcgcgaacgcgtggtgattgtcgaggtcgaaaatgcgcgcctggtactgggcgtgaccgcctcgcagatcaacctgctgcacaccctgccgcccgcggagaatgacacggaagcacccgttgccccaccggcggatttccagaacatgatgaagagcttactcaagcgttccgggagatcctgatgcgccgtttgttattcctttctctggcgggtctgtggctttttagtcccgccgccgctgcgcaactgccggggcttatcagccaaccattagcgggcggaggccaaagctggtcattatccgtccagacgctggttttcatcacctcgctgacgtttctgccggcgattttactgatgatgacgagcttcacgcgtatcatcattgtttttggcctgttgcgtaacgcgctgggcacgccctcggcaccgccaaatcaggtgttactcgggctggcgttgtttttgaccttttttattatgtcgcccgtcattgacaagatttacgtggatgcttaccagccgtttagcgagcagaaaatttctatgcaggaagcgctggataaaggcgcgcaaccgttacgcgcgttcatgctgcgccaaacccgcgaagccgatctggcgctgtttgcccgtctggccaatagcggtccgttacagggaccggaagcagtaccgatgcgtatcctcctgcccgcttatgtcaccagcgaattaaagacggcgtttcagatcggttttacgattttcatcccttttttgattatcgacctggtgatcgccagcgtattgatggcgttggggatgatgatggtgccgccagcgacaatcgccctaccgtttaagctgatgctgtttgtgctggtcgatggttggcaattgcttatggggtcgctggcccaaagcttttacagttagaggcgcaaaatgactcctgaatccgtcatgatgatgggcaccgaggcgatgaaagtcgctctcgccctggctgcgccgctgttactcgtcgcgctgattaccggcctcattatcagcatcttgcaggccgcgactcagattaatgaaatgacgctgtcgtttatccctaaaatcgtcgcggtattcatcgcaattatcgttgccggcccgtggatgctcaacctgctgctggattacgtgcgcactctgttcagcaatttaccttatatcatcggataaacagaacgatgatccaggttacaagcgagcaatggctatactggctgcatctctatttctggcctttgctgcgcgtactggcgctgatttcaacggcgcccattctcagcgagcgcgctattcccaagcgggtaaaactggggttgggaataatgattacccttgttatcgcgccgtcgctaccggcaaacgatacgccgcttttttctattgccgccttatggctggcgatgcaacaaattctgatcggtattgcgctgggatttaccatgcaattcgcctttgcggcggtgcgtaccgcaggtgagtttatcggtctgcaaatggggctttcctttgccaccttcgtcgacccgggcagccacctgaatatgccggttctggcgcgtattatggatatgctcgccatgctactgtttctcacctttaatggccatttgtggcttatttcgctgctggtcgataccttccacaccctgcccatcggtagtaacccggtgaacagtaatgcatttatggcgctcgccagggccggagggctcattttcttaaacggactgatgctggcattgccggtcattaccctcctgcttacgctcaacctggcgctggggctattaaaccgcatggcgccgcagctctcgatatttgttatcggtttcccgcttaccctcaccgtcggcattatgctgatggccgcgctaatgccattaattgcgccgttttgcgaacatttattcagcgaaattttcaatttgcttgctgatattgttagcgagatgccgataaataataacccataatttttatcctgttttactaaggtttatccgaaaataaattttaaaaaacattcaccaggatatatccactgccccttatttgtttttacttcactcacataacgcaacattcactttactttaagatgattcctggcaaattatatgtaactttacgggatagtaagttcgcctgaaaaaccgcgtaagcgttgtctaaggtgactattcgtgttccgtctgattatggtgagttattcaggtaaggggaattatcgttacgcattgagtgagggtatgccatgtcaacgattattatggatttgtgcagttacacccggctagggttaagcgggtatctggtcagcagaggggtgaaaaaaagggaaatcaacgacatcgaaaccgttgacgaactcgctatcgcttgtggcgcgcatcagccttcggtggtgtttattaatgaggactgtttcattcatacgccttcagacagtcaacaaataaagcaaatcattaatcaacatcctgacacgttatttattgtttttatggcaattgctaatgtgcattttgatgaatatttattagtaagaaaaaacttattgattagctcgaaatcgattaaacctgactcgctggatacccttcttggcgatattctgaaaaaagagtcgggtatttcaggaaccataaatttaccaacattatcgttaagtcgaactgaatccagcatgttgcgaatgtggatggaaggtcagggaaccattcagatttctgacagaatgaatattaaagcaaaaacagtatcctcccataaggggaatataaaaagaaagataaaaacgcataataaacaagtgatctatcacgtagtacggctgacagataacgtcactaacggcatttttgttaacatgcgctgagacatccggactggcaatgtacctccagtccggctcaattagtcctgctccgccttctcgacaaaaataccatcctggtgacctgactcattgaagaaccagatgccgagcgggtaatcctccagcgaaaccaggtacattgtgccttcactaaattcttccactgccagtaccacgcccggtcggcggggaccgccgtccgttttaacggttacccgatcattcaccttcatcattttcctcctgtcgctttgtgccagtgtagaacaattttctgcgtctgacagcgccttgccggcgtgtttgctggttttctcaacggtctatacttaggctgtcaggaacccgtgaggtggtgaagatgaaaacggcaaaagagtacagtgatacggccaagcgcgaagtgagcgtcgatgtagatgcgctactggcggccatcaatgaaatcagcgaaagcgaggttcaccgtagccaggaagatcctgagcgggtgagcgtagacggacgggaatatcatacatggcatgaattagctgaagcattcgagctggatattcatgattttagtgtaacagaagtaaaccgttaaaaatggccgaaaaaaatcccggccctacgggtcgggatcaaacttgcttatgcaagaagcacttgaaaattcgttacaccaggaaatctgatgtgagatttaccttatctgcaatttttttgcatgacaagtaaatattttttacatgaatgattaagcacgctaatagttcggtagcaaaagtgtgacaacgcatgtgctgcctggaagcgacgggatcggttccagttagcgttcgacttctttcgggtgtgctttaggacttttcctggaaataagcccgccgttgcaacggaaaatgaggaaaaaatgctctcaatccatgaccccttgctgatttttaccgatctggacggcacattgctgaacagccacacttttgagtggcagcccgcggccccctggcttacacgcctgcatgaaagcggcgtgcccgtgatcctctgtagcagtaaaaccgcggctgaaatgctccagctccagacgacgttaaatctacagggactgccgctgattgcggaaaacggcgcagtgatccaactggacgttcattgggaagaccatcccaactatccccgtctgatagccggtatttctcacaacgaaatccgcctcgtcctgcataagttgcgtgaaaaggaacagtttaagttcaccacgtttgatgacgttgacgatcaggtgataagcgaatggacgggcctaaaccgggcacagtctgccctaacccgtctgcatgaagcgtcggtgtcgctgatctggcgcgatagcgatgaacgcatggcgcagtttgtcgcccgtttaaatgacctgggactgcaatttgtccatggcgcccgtttctggcatgtgctggacgcctccgccggtaaagatcaggctgccaattggctgattgaagcatatcgtcggcagtggcgcgcgcgtcctctgacgttggggctaggagacggccccaatgatgcgcccttactggatgtgatggattatgcggttgtcgttaaagggctaaaccgggagggcgtacatttgcgtaacgacgatcctcagcgcgtctaccgtagccagaacgaagggccggatggctggcgcgaaggaatggactatttcttttcccgctcctgagtcgcgtcgctggcgcaaatacggttacgtccggactgtttggcgtaataaagccgtttgtcggccagcgactgcaactgctcaaaatcatagtcgccgtattcctccgcgctactgatccccattgacgcgctgatacgaagcgtcgtgcttttcgtcaccagaatctctttgtcattaatgcgctggcgtatgcgttcggcaatctgcagcgcctgcgctttcgtcgcgccgggcagcacgatacaaaactcttcgccccctacccgtccggcgatgtcgtgcgctcgaatggtgctgccaatgagcccagcggcatgggacaacacgcgatcgcctgcctgatgaccaaagcgatcgttaacgcttttaaaataatctaaatccagctgtatcacagaaaatggctggcgggcttcccggtagcgctttgccagcctggacgctttttcaaacagcgcgccacggttatatagccgggtcagcggatcgtgccatgcctgccattgcagcgaattttgcagaacaaacatgtttttgaccatatgtcgaataacgccccaggagatcaacagcatcgccgtaaaaagcccccataacagcgtcagcgcgatactaatgctgccaaaattcccttgtatgccttcacgtaatgtatgcacgcgcagcaggatgccatcaaaatgatccagccgctcccagcttacataatgcgttcctaaacgcagcccgcccagggtatctttttctatttcacgcgccagtaaggcgcgctcacggtcatttaacgtattcgcggtttgttgttccggcgcggagtccgtcaacaaacggagatggttatcgtatagctgatattccccttcaatatccttttcggccgcatcgcgcaggaaccgctgtaatgacgcgacgggaatatccattgccagtacgccataccagtaattatcgtgatccagcggtagactggctgtcacttttttctgctcgtcagtaacatagggctgtgcggaggtaaaccaccgcacgccgcgctgtgagttacgccgttggctttgctcgataaaccatggctgagtcacgtactgatagtaacgggagacaatatcgctaccgtacgccgtagggagagttgagaggtaaaaccctgagcgagaaacatacatcgtctccagcgccagcatggctgatgagcgcgccagacgcgccagataccctaactccagcgtggcggttaattcatttgccaggtcacgactctcccgcgaaagaagcgtcgtccgggcgacaaattgatcggaaacgccatataacggcaatgtccgccgcttatccaactccaattgccagaaatgtctgacgcgtcgttgctcaaactgcgtcaccgcgctttgcaatgcggaaaaagccagcggcgccaccagcgcttcatgcataccgttgcgtaaaaagatcaacctgtccatgttgaattgcagttggcggtcaaggacattcgcgacgctccccagatgattgcgctgactggcgacatacgcgtctttcagtatcatcacttccctccaggtaagtagcgtcgagaacagcatcacgatcagaaaacaggtgttgacgacatgaccgggaccaaaacgccgcgccagctttttaaaccagccttgattgtctaacagtgtttcgtgcggcaccctggtaactcctggttattgatacaactccccctgatggcttacggtagccagacctcatcaagggataccactcaatcctggcataaccaggtagcagcatgtcgcagcgcgacgactctttttctccacagcaaaacgcccggcattaaccgggcgttttgtcatcgggcttcgtcccgcacgcgcctttccttgcctggcacgagctcattctcatggaatgcctcccgctttacgccaaaaccatcataccagcgacactctaccattccgctggaataaccggtgacgatcatccggggcccaccctctttcacggtaacttcctcactgacagaaaagaccatacctgcctcctgtatcagatgaaacgctttcaccttagacgaggatggacaattttgcataattcattgtagaaaatcagtgcgaaacaccgcgaattttcgccacacctttcaccagcgccaccacaatggcgccgataataaagccgagcaccagattcagccccgcagggatcgtatgcgccatgaaagccccctgctgctgcgcaaaatgttcaatggcatggtgtagcggcgcaataccgtgtacgacaattccgccgccaaccagaaacatcgccagcgtaccgacaatggataatgctttcattaaccagggcgcgataatcagtaatcctttaccgacgccctgcgccagcacgctacgcttttccgccagccagtaccccatatcatccagtttgacaataatacccaccaggccatacacgccaatggtcacaaccaacgcaatccccgccagtaccaacacctgattaagcagcggcgcctgcgcgacaatccccagggtaatggccacaatttcagcggacagaatgaaatcggtacggaccgccccttttactttatctttttcaaaggccaaagggttttgcgcagccagcgcctcaagacgtttttgccgctccgccgggtcttctttgtgttttcgcgcctcaaaggtatgcaggactttttctaccccttcaaagcagagaaacgcgccgcctaacattaataaaggcgtaatggcccacgggataaatgcgcttatcaacagcgccaacggcaccagaataaccttgttgattaatgatcctttcgccacgctccataccaccggcagctcgcgattagcgcgaacgccggtcacctgctgcgcattgagcgacaggtcatcccccagtacgcccgcggtttttttcgcggccaatttgcccattaccgaaatatcgtccagcagcgtggcgatatcgtcgagtaatgtcagtaagctacttcctgccaaaatgatttcctcggtcttttcttctaagacgttaagtatgtagcaaaacgcgcaatgccgaaaccggcggcgcgggtcaacgcctttttattccaaaaggacaattataatgctcgccagcataataattttgacgtttactatattcaccctttttatttcaccgtgagtgattatgcgtttccggcagttattacctctttttggcgcgctttttgccttgtacatcatttgggggtctacctattttgttatccgcataggcgttgaaagctggccgccgctgatgatggcaggcgtacgttttctctcggcggggatgttgctcatggcgtttttgctgttgcgcggcgaaaaacttccgccgctgcgccagaccatcaacgccgcgctgattggtctactgctgctggcggtgggtaacggtctggtgacggtggcggagcatcaaaacgtgccatcgggcattgctgccgtcgtggtcgccactgtcccgctatttacgctgtgctttagctacttttttggtattaaaacgcgcaaattagaatgggtggggattgccattggacttgccgggattattctgctgaacagcggcggcaacttaagcggcaatccgtggggcgcgattttgatcctgataggttcgatgagctgggcatttggttccgtttacggctcgcgcatcgccctgcctgtgggcatgatggcgggtgcgattgaaatgctggcggcgggcgtggtattgctttgcgcggcgtttctttccggcgagaagctcgccacgctgcctggtttatcggggtttatggccgtcggctacctggcgttgttcggttctattatcgccattaatgcctatatgtacctgattcgcaacgtcagtccggcgctggcgaccagctacgcctatgtgaatccggttgtcgccgtgttacttggcactggcctgggcggtgagaggttatcgcccgttgaatgggccgcgctgggtgtgattgtgtttgccgtagtgctggtgactctgggtaagtacctgtttcctgtcaaggcggtggtcacgccgtgtaaaacggaagattcacgccagtagatgaatcccctgggtgtcgatctgcgcgctggcgccgccgccgcagatccactcttccaggcgctccgccaacgccgcgtcgctcaatttcgctcgcccgcgcaaggcgcactcccagacgatcagtacccgccagccaagcgcctgtaaacgctgaatatcgcgctcatcgcgctcaacgttcttaccgattttttccagccagaaagccgttcgcgtggccggcactttgaacagataacagtggtgatgatgccaaaagcagccgtgagtaaaaatcacacaatcataatcattcaccacaaagtccggcttgcccggtaatgtcgcgtcctgagtatgaaacgtaatcccctgtgcgcttaacaggccagcaagacgtttttcaatagccgtatcgcgggtcgctatcgcgcgcatatttttactgcgcgtggctttatcgtgaacgtccgccatctaccgtctctctctgacgcaacgtcaccgcctggtgaattttgggttccaacagctttgctaccgcagcaaataccggcaccaccacggagttgccaaactggcgataggcctgcgtatccgagacaggtatcctgaactggtacgtttgcggcgcctcaaatcccattaaacgcgcgcactctctcggcgtgagtcggcggggacgatgttgttggttgccagcatcgtcgaaattcacttcgcctttcgccatatcccaaccacgatcgatcagaatttcggcaccatctttgtagtagcgagcagataacgtgcgcgccacactttccggattgtcaggataaaccatgccatagccaaaaccgtttccccgcgcctggtgctttttcgcgtagcgatataaatatttccacagcaccggcgtcaggatatatttggcttcgacgacgggctccagcagttctgccagcgtcggacggcgcggtggataacaacgggcgatattgcgtaacgtaaaatcggttttcaggtttaaatcgcgacggaatcccaccaacacaatacgttcccgatgctgaggaagaaagtgctgcccgtcgataattttcggatcgtccgggccattgtcagcggcatccgccacgtcatatcccagttcatcaagcgtttgcataataatgcggaaggtgttgccctggtcgtgacttttaaggtttttcacgttttccagcacaaacagcgcggggcggcgggcgtcgataattcttacgacatcaaaaaataacgtcccctgagtctcgcaggcaaagccgtgggcgcggcccagcgcatttttcttggaaacgcccgccagagaaaatggctgacagggaaagcccgccagcaggacatcatgttgcggaatatgctggcgaatgtgttccgccgcctcatcatcgctgaccccttcccggtggctcaatgtgatatcgcggatatcttcattaaagcgatgttgcagcggatcgcaaaaatagttcgctttatatgtccgtaccgcgtgcttattccattcgctggtaaacacgcactgtccgcctatcgcttcaaatccgcggcgaataccgccgatgcccgcgaagagatcgataaaacgaaaggcgtaatgtggatgatgcgctggcggcgtcggcaactctgttttaagacaggtgagttcattgtcgctcaagcgatgccatgccgcgttcatcattacgcgcttgaagatggccgggctccagtgctgttcgcccaggccgttaaggtgcgccaccagcgttttaacatcgtagatttccagcaattgactcagcatcgcctggagctcgcttccggcgtcgtcggcgatgaggttccgggcgtgtgttactgaaatattttcctgcatacatttaaccggccaaaaataattgccgacagactaacataaaatgacgcggtttacgtttcagcgacaggggttactgatgcgtagcaaacatctggatgaccgcatcatcccgtgtttcatagtcgcctttcagctcagcgctcagtttcgccatgtacgacaccagaaaatccgcattacgctgcgccaggtacttgccccgttcggtctgcatcgtcagcggcagtttcagcagtttggtttgaaaatggtcgagcgcgaattgcttatcgttaagaggccgtctgtcggcaaagggatcgtcggcatcaaataacgcgacgcccagcgcgccggagaccgcgaagacccgcgccagaccaatggcgcccaacgcctccagcctgtctgcatcctgcacgatttttgcctctggcgtggtaggcgcaatttttgcgctgaagctatgcgcttcgatagcatgacaaatgcccgccagtttttctgccggaaagtcaggaaaatcccgcagaaaaatacgccgggtttctgccgccgccagaatggaagaacgatgccgctgcggatgatttttcgccaggctgacgatgtcatggaaataacatgccgatagcaccaccagccagtcgacaggactgttttcccccagcgtttgcgcggttgcccaaacacgacgaaaatggaagatgtcatgggcggcatcctgttcctgatggtggtgacgtagccagtcttcaaactgcgattgccagtatcctgagtccatacgccctctctttatagcagaccatttttattacatgcctgagcacagggttcgctatcctgacatatccgccaccactttacatccctgcttacttgcgcgtttctggcttagtgtcggcgggataagccctgtttttgcgaggccgggtataccaggcaatactccccagaataagccagacgacgcccagcgaaagcgcgttaagccatttttccgttgcgctgccaggagtgctgattgggccgagaaccggctcggtttgtatggcggacatcagccacacgcaacgcgccatcgcccagatgaagtagccgcaaaaggtataaaaaacccataacgctaatttgccgcccatgctacgggtggcgttgtcctccctggtactcaaactttactccgcttttgtgatgtaagtcatatgacattaattacattataatgtgatattaatcacatttcgactatggaatacctcatccacctgttctggctattcattccacaaatagtttattctcagttaatgttacgtctggcgctgaacctgctgttaaataagggaatggtgattgaatcgcactctgatgcagaataacctataaccagaacaacttatttttacgcaccgcgatagcgttttattttatcagcattaagtgtcagaatgattcggttattagccttttatcatttattttatcattacccacattaccggcatttatgccggttttttttatgttttttcataatcaaagcatcaaatacatataaaaaacaaattatattcacaccaacaaccatcaaatcaaaaaacataacccattgataaaaaatgataattatagaatatatattcttagttacttatatagtctgtattataaaaaaccaaacagaaacaaattgaaatattttaaatacctttgttacatgttattttttaaattccatgaacttcatagaatagtatcaatttgtagttttgttgaagtggctacatattcatataaattattatcataagggaatacataatgaacagaaaagttctggcactgcttgtcccggcgttattagtggcaggcgcagcaaatgcggctgaagtttataataaaaatggcaacaaactcgacctgtacggcaaagttgatggtctgcgttacttctctgacaatgcaggcgacgacggcgaccagtcctacgcccgttttggctttaaaggcgaaacgcagattaacgatatgctgaccggctatggtcagtgggaatacaacattaaggtaaacaccaccgaaggcgaaggtgcaaactcctggactcgtctgggctttgccggtctgaaattcggcgagtacggctctttcgattatggccgtaactatggtgttatctacgacattgaagcctggaccgatgcgctgccggaattcggcggtgacacttatacccagaccgatgtctatatgctgggcagaaccaacggcgttgctacctaccgtaataccgacttcttcggtctggtggaaggcctgaacttcgcgttgcagtaccagggtaataatgaagatcctggcgcaggcgaaggaacagccaacggcagcgatgcagatagtggtactcgcaaactggcccgtgaaaacggcgacggtttcggtatgtctacctcctacgactttgacttcgggttaagcctgggtgcggcctactcttcctctgaccgtacggacaatcaggttgctagtgggcgtggtgatggccatcattactatggcaatagctatgccggcggtgaaactgccgaagcctggaccgtaggtgtcaaatatgacgcctataacgtatacctggcggccatgtacgctgaaacccgcaacatgacctattatggcggcggcgatggcggtgatggcggtatcgctaacaaaacccagaactttgaagtggttgcacagtatcagttcgatttcggtctgcgtccgtccatcgcctacttgcagtctaagggcaaagatttaggcggccaggatatggatagccgtggtaactatcgttacaccgacaaagatctggttaaatatgttgacgttggtatgacttactacttcaacaaaaatatgtccacctacgttgattataaaatcaacctgctggacgaagatgatgacttctacgcaaacaacggtattgcaaccgatgatatcgtaggtgttggtctggtctaccagttctaagacgctttatgttattcaagcccgtgcttagcgcgggcttgttattatagggtaagaattaaataacggataacggcgcaaagacaggttgacctggtttcatcggatagatgaagacaacatcgcttttttcaggcgctgtctgcaagagaaataacacttttggggaaaggaaaatgccactatagatgatggatgtcagcgtctatagatgataatcatccgggcataaaaaagctcctgtacggagctaatatgaattattttctaaaatctggcggaacctgccctgagcgaatgtataatccaacattatcaaaagtgatcatggttgacttacaaaaaatacatttcgcgccaaacgggttttgctcagtaacatcgaatgtcgatgttctgtattgtgaaccatggcaacatggacaccggaagtgaattttattagtaatatcagttgccttaaagcgccacaacgttgaccgctgatggaccttttggtccctgctctactgaaaactccacttcctgattttcattcagagtgcggaattcattactttgaatggctgaaaaatgcacaaacacatctttgctgccatctttaggcgtaatgaaaccaaagcccttttcagggttaaaccattttactaaaccagtgattttcgtcgtcataatattgttacctttcgaatgagcccttgggcaaaatggcctgaagaaaattatcagagagaaaaaaacctaaaggagatctcaagaggaacaaatgatgagaaatattacaatcactacttcagataagtttgtatcaaaccgcacaaccattaacgcatggttaactgaacatagcaagctttagttttgttaaaaaaatattaattgttttttagcattatcacgctgattgccatactctttttattcatgcctgtcgctacggctgaaacctggcgtaaataagtgacgtctcacaacgcctgccgggcaataaacgcgccacattttctgatgtcgtaaaccaggatacatgcgcctcatcgtgagaggttcctgtgatcttgtgcgaccaaaaccggttagagaacggggatgatttggcaaccatctcaggcattgatcgcacaagttacttaacacgcagtagatcagagtatcttgtggtgtaccgaggcgaaagcatttctcgcttcatagcccactgttgcgacatcccctgcccggcgaagtacagcgtccccttcccgtcttttgcgttaagatggtccagtacttccatcaacttcgcactaccggcgcgcggcgcgttatcgtcgaaaaggttgagttgcgctacgccctgactgaagaagtcacccagcatcacccccgctttctggtagcgatggccgtcgcgccatattttatccaggcatttcacagccgcattgataatgtcacgtgaatcctgcgtgggggtgagaagcgtcaccgcggcgctgttaccgtagtagggctcgttcagggcaaagggtgatgttttgacgaatgttgaaatgaaacggcagtactggtgctcgccgcggagtttttctgccgcgcgcgcagcgtagctgtaaacagcctggcgcatttcctcatagtctgtgacccgctcgccgaaagagcgactacaaacgatttcctgctttgccggcgcaaactcttcgagctccagacatggctctccgcgaagctctctcacggtacgctccagcacgacattgaagtgtttcctgatgatccaggtactttgttcagagagatcgagagcagtcttgatgcccagggcattgagcttcttactgatgcgcctgccgacaccccagacatcctccacgggtatcagggccagcagccgacgctggcgatcgatgttcgacaagtcaaccaccccgtcggtctggcgctgccactttttcgcagcatggttagccagcttggcaagggttttcgtctgggcaatgcctacaccgacagtcaggtgcgtgcgcttcaggaccgtcgctcttatctcgcgcccgaaatctgtcagatcccggcagtttcgtacccccgtcagatcacaaaaggcctcatcaatgctgtaaatttctacccgcggcaccatctcctcgagtgtggtcattacccggttcgacatatcagcgtaaagctcgtaattactgctgaagcaaacaacaccggatcgccggaagcgttctttctgtttgaagtatggctcacctggtgcgataccgagctgtttcgcctcggcgctacacgcgataacgcagccatcattgtttgataacaccaccaccggtcggccacataaatcaggacgaaagaccgtttcgcaggaggcgtaaaagctattaacatcgcagagcgcgaacataatcaactgaccgctttaatgataaaggtcaccaccccgaatatgtcgagcgtgtcttcactgccgacaggtataggtcgataggcgccgttcatggggattaactgcactgtcgggcgcaactgcaaccgttttacggtgaactctccttcaattgccgcaattacaatgtcaccgtggtcagcgttccgtgagctatccaccaccagcaggtcaccgtcgctgatgcctgcttcaatcattgaatcccccgaggctttgacaaaatatgttgagctgggatgagaaacgagcaactcattaagatcgatacgctgctcaatgtagtccgccgcggggctggggaatccacacggcactaagtaactgaaaaatgggagaggaataatttcgcgcaactctgtaggtctgaaaaattccataatccatacctcgaatactgtttttatatacagtagtgttatttgaacatgcgcgcaagataccggagtcgctacgactgtttaaatcttcgtcgcttcgtttgtaagtttctctctcagttcaaattatgggttttgtaaattttccggttgtattgtcatgtgcgcatatttaagccagcctggaggccagattttctgtacagcgtcgacagtcccgcagcgtaagttatcgccacgcgccagcgcgtttccctcacagcaattaatcttctgcccggcgcccatgtctacaggggaacatgtcgggcaacaggccgggtgcgacgatgaccgaggacgacggcgttaagtcgccgcgagtgacatcaatattaatccagatggggtacggcgaaagagcggggcagaaaaccaggagttgacttatgatcgaaaagtaaaaataacaccatccctggccccctcttctggcagaaaaagcataagatggcgatacgtttttcacgtaatattctaacagaatattctaagtgtattctaagtgtgagactgatcgctgaaagaagatgagctaagtgtttgaattgtggcggagagagggggatttgaacccccggtagagttgcccctactccggttttcgagaccgtcccaatattcttatttaacattaacttatctaataacacgagaaaaaagtagcatttttgtacgcagtattttcagaaagttagcctacttatcaaaatcattttctcaccatgatagactattttttaaacaaaaccatctcctttattgacttcccacaacaacatgcgccataacatcttcgtggcatctggtggtttccgtccttaatcagttatgggattcctacaggttcaccggatgccacaaccttccctcatgcttctagttagcgcggtaatcccgttttttaactcccttccggttagccgataacagaatccagtacagcccgtgtatcgacagccccacatcataaataatcgctacctgctgtcgcggtattcctgccccaatcagacgcccggcctgcgcccattgctcaggtgataactttggtcttcgcccgccaatctcccctgtccccctgcaatacaataaaaacatatcgtataagaagtataaaatacttattcaaaaatgtaattttaagccccccctaaccaagtaaaaactatcgtttcagatagctatggcacgaaaatacggtagcaaatcttcatacaaaaatcttccaatttattaaactaaggttaaaacccgatatcttatcaatctcaaatcatggtatgttatattaatagcgtaagggttgaaaaatgttttctcgagtcagaggttttctttcatgccagaactattctcatactgcaactccagctattactctgccttcatcaggtagtgcaaactttgccggagttgaatatcctttattgccattagatcagcacacccccctactttttcaatggtttgaacgaaacccaagcaggtttggggaaaaccagatcccaattattaatactcaacaaaacccctatctcaataatattatcaacgccgctataatagaaaaagagagaactatcggggttttagttgatgggaattttagtgctggacaaaagaaagcattagcaaagctggaaaaacaatatgaaaatataaaggttatctataattccgacctggattatagcatgtatgacaagaaactatcagatatttatttagaaaacatcgctaaaattgaagctcaaccagcaaatgtcagagatgaatatctgcttggtgagataaaaaagagtttaaatgaagttttaaagaacaatccagaggagtcccttgtttcgtcccatgataaacgcttgggacatgtacggtttgatttttacagaaatctttttttattaaaaggaagtaatgcttttctggaggcgggcaaacatggctgccatcacctgcaacctggaggtggctgcatatatcttgatgctgatatgttacttacaggtaaactcggcactttgtatttacctgatggtattgctgttcatgtaagtcgtaaaggtaatagcatgagtcttgaaaatgggattatcgccgttaaccgcagcgagcatccggcattgaaaaaaggacttgaaattatgcacagtaaaccttatggcgatccatacattgatggtgtctgcggtgggctaaggcattattttaattgttctatacggcacaattatgaagagttttgtaattttatagaatttaagcatgaacatatttttatggataccagcagtttgactatcagctcctggagataattatttgcaaacgtatgatataaacgcgagcaatgtttcggcaaagctaaacgtaaagaccatactgacgatttcgatcgatatcgtggatgtgacgcgcgtacctccattaaattggatgacctgcgtgccgtggtgaaaatcactcatccggttaactccgtggttaaggggtgagtatattttcaggtcagtacacaagagggggctatttgtaccggctgtcaggttgatggcacaacgacaggaaaaagaaaaggcgggtaataaacccgcctgaatatttagcgtggtatatccggccagtcaggcgcagatgtatccaccctgtttaccattacgctataaagttcccatgcttccagccgtttaatctcttcatctgtggcaatttttagttttactgcccgtgccagtggtgcgatggctgattcagcctcagcaaggcggcgaactttttcagcctccgcctttttacgcagctcttccggagaataaccccgttgaacgactttaccgtcctgatataaccacgtaccatcaccacggcaatcatcagggcagtcagcagcgtctatttccgcaacagacatattaaccggccacaacattgatacagaatatgtgtttcctcgttgcgggactggcttattaacaacaccccagataaccccctcatggtcgtacattatttttgcagtatcatcagaaaataatgactgacactcataccagtcctgtccatcgtccgactccagaaaatatgcacctatatttatttcagcctgagttttatccctgtttacgggcgcgtcaataagtctgaaatttttgatattctgatattttttcattataccgttcccccttgtacggtataccactgactcccgactcgtttttgcaaaggcgcataattaataccatcaatattttcgccctgataatctttccagacggaggtaactacatatccgggagtgttaggccaggaacctgcattgttccaggtagtcactgatgtgccagcccctaactgaacatctaagacgagattattattaatccaggtacttaaccagccatttccccatagcgaaccaaagatgtcgccgttattctgatagatagccccgcctgcacgaagcgtgttagcggtgatatctccattgaccgtaaagacaatcgaaccgtcaggatttcgctggctgtacagatgccatccctgatcgtcgtccagttcaataactgttggcctgtttgcgtcgccccataaattaaacgtggctgtcattgtcgaattattattgctcgtcagtgacagtttttttgcgttgcctgcgcgtacggcaccattagtgagaacatctactgacatgtgcagcccggaattgtcgatataaccaaccagagcattattggcataaatccccagaacgccgtcactgtgccacttaaaccctgtatcgttatctccgaatacaatcgaattaccacccagcgcattatcagtaccaatgcctaacggaccgtttagcctccctccattaactgacagtgcctcaacgtcaccggctgtgggtttcatcagactattaaacagtgtatatgtctgaccgctggttgagtttcccggctgaactgatgaatattcaggcgtactgtgcagcgtgacatttgcattaccggtgtaatcatattgcgcaattaaccagtacgcatactggccgatattaatataaatatcgtaggtgtcgcctgatgtattaacccatgcgacctcgttagcagcagaaggtgaacgcctccataatgtggcggttattccaacaggtgaaccattaccggcacgcaataccagttcgctgattgccgcctgttcaggtgaaccagcgttaaaccccgccccaccgtacagtttaatcaccgcagttgatgtagcctgcggcattacaaccgtggcgattttgaaccagcctgattcgccaagtgtaatggtggttgacgttaccgcaccgatggttctcgcaaattgttttttgtcaggaatatcgccgccgttctgcgatttttgcagggcccctgcagcgagatttatcgtttctcctaaaccgacgttctggagaaacagcggcttattcgggatgtccgcgccattctgatttttttcaagacgggttttaacctgttcatcgatcagcctgccaatggcggcgtgaagctgcgtatgttcgcctttactgagtggtatgccggcggcttcaataacagtacagacctcttcctggactgcatcccacatatcactgttgagatccgttgcgcggcggcccgtggcgggatcaccattcgtaaatccgttttttccctgaccaaatttatctttttgcgcggtgggcgtatcaattctgtgcattctcttttccttccggataagcaaaaacaacaaccgtatgtgacggacaaagcttatcaatcacacattcagcaacagtatcgccccacgttctgatcgcagagtcgcaggtgcttgtacaggtctgccagctgatgttcgcatcagccggaatattcacacgccagtagtaacgccagaattccccccattcaggatcgggtgtgctgtcgagattctgaaactgctcaatggtggcagcggtataccccaacgcatcaagctgttcccgataaaacctctcgtttataccgccagcaacatttgcctttgcatccagccgttgctggcgctgctgtaatgtctgaacgccttccggtgcacaggaatcaggcaggccatacagctgttcataacggtctatcagttctgtggttctggccggatcaatttcagccatcagttcatccgctctctgatgtacccggttcagcgacggcgccagcccttcaatcagtgggttttctccgtcccaggcaggcccttccggcagaaggtgataaagtaactgcgtatattcgtcctgtaatgccatagttatccgttctccccggtataggtggcccaggttatattccccaggacaggaagttcagtttttcccagcaccacatctgccgccggcacacgcagctgatgtgccacttccccggtcgccagacttatcgcctcgctgattcgcgaaacataaatttttccggacggcgcgccatcacgcagcatcagcgcatttagctccgcaataatggcagtacgaatttccggggtatctttggccagtgcgactgttaccggaatgcttttttcagtggcagcgaaaacaaagagtccgccgccagcaacaggtgccagcggcaaaatatggtcacgtacagccttaacgagatcgtcgccaggagccggattcaccgggttactggtagccaccatcacaccaacggtgccggtccccttataatggcggaatgtccacgcacgggttattcccgcgatttcctttgcccagatgacgtaatcaggatcagcgcccccctgtggtatccagtaatagcgttccatgacgcgcgcgcgccacgtttcaggctcctctgtatcagccccccccggtcagagtgtcagcgtaacctgtagaaggaataccagtaatcggcgtgccaaggcgtaacgccgtaccatcgtcagtattaccggcagttcccgccacatcagcaataaccggcacacgtaacaggccgccggaagctttcaccgtctgcagggtcgtgaatgtaacctgatcatcccgctgaatctgtgtacccgcggggatctccggcgttccggcaataccatcccagcgtgcaaatcccttcgcagatacggcatttttcctgggacaacgcttaatcctcgcgtgacggtaaagccagtcctcatcacacatatcaggcagcatattccgggccagataatcgatataaccatacagcgtatgtacggcagcagcctgtacccggctgtaaacctcggcatccatgcgacgtaacacaacatcctgctgaaaacgggtcagtaaatcgctgcgaatggtagcaatcaactgaggaagttcaggacgtgcaaattgactgtcagccattaagtttgctccatatatcatcgaatgtaatattgtgaattaccccgtcccgctgatatatcgtcacgccagctgccagggtatctgttcctgtgcgttcagatgtcacatcaatacgtgccgccacgccatcgtctgtcatccacgccagcgcctgctgcatgtattcgcgggcatcctgcggcgttttattggtgagtttgcggcgtttcagcaggtagaggcgggaaccgatgcggtcattctgaacagcaggccaggtgtccccccaccagccgtatggctgtggggtcctgtcatcccgctccgcccggcgccaggtaaaaagagaaatcaccactgcccgcgtcagaaagtcgagcgaagccgtggcatccttacggattccattaacataaaggatcatggtgtcagctcatgggttggccaggcttatcggttataccgccgccatcgccattttctttatgggtatgaccgttataggtcgtgcgcatttcagccatcgtttttccactgctgtcacagttgtccctgatatcgccagtggattcgatcggcatttcaaaacgtgctttagtggcattcgtgaaaataactggctttccgccgccatttaccactattccggctcgggttaatgtgaccgactgcccctgatcgtcatatagcgcgacttccccgcgcgccagccctttcagtctgaagcggcggtcagccacaaccacagccactccgtgcgaacggtcaccgccgggaaacaataccaccgcttctgcgccattctgtgctgcagaggtgaaaccgtaaggttcaagatgctccacattctcttttttttcaccggcaataagtttcagtccggcagtctggcattttctgacggtatcaatcgcggtaatgactgcgcgcgttatcatgttctgaagaggatggttagccatcagaaatctgcctcctcactgacttttttcttcgctttcggcctgaatggttcaggaagataggcatccgcaggccccacccggatttcggtcagggtgccgttattgtcctggctgtacgtcacttcggcgatcaccagcgtttcattgtcaaaaccgttcagcgggtcatacaccaccacggcctgattcggtttccacaattcgccattcccctgtctccatccctgtacggtataggtggtttccagcgttttcgccgcacgctgacgggcttcaaattcacagcgtgatttgcagctgtcagttgtggcagttcctgactgctgaatggtgtggggacgataccgcgtgacgcctgcatcaccagtactctgccggatagcagcaatggttgcctcgccgaaatcgtcatccgtaccaggacgctgccccgtaaccagataactggagaaacgctcacgaacactacgctcggtatcacaggaaagaatattttcgccaagtaccagtgccgtggctgctttcatactgcccggcctgccgagaaccagccgtccccgttcgtcgtcatatgccagcgcctgagcctgtccaagcagcctgttcagacagtccacaaccgtttcaccatgttccggctgagcctcaataacggcggctgccggcgcgcctgcatcaacaacgtccacaccgaatggccgggcaagtgcgctggcgatcaggaataaattttccccgttatgctgtgcaggcgacgcagaacagtcgataagatctgccgttttgctgcgcccgacaatgcccgtcataatggtctgcgcatcataacgtagcggtaacgcctcaacccagccggtaataactaaatcatcgccaatgagtacctcaacagagtcaccattttttactggcggtacgtcttctccaccaggccactgccgggtgatcgagacattaaagtcccgggcaatacggtcaatgcccgcacttatccgtactgacgtccatcctccccagtcacgcccgttgacgcgtaaaaaaaccgtattattcatcgtaccggaaccctcagcggctcaaccgggataaatcctggatggggaacgggattacgagtgaggatgtcagattcccgcccggcgtcgtcataccaggctgcagccagtaccagtgcaggcagaacatcatcaggcgttcgcaatgcagtacgttcaacctgtgccagtcgtgcagaaatatcgcgattgagatccgtccgcataacggaaatttgctggaaaagcacatcatcccggatacgcaactgctcctggtcaatcgcagcattgagcgcggtccggatagctttcagatcctcataattcggtggagagctgccattactgactgtctgtacaccatccagcgccgggtgcatgacagtgataatgtctgagtcacggcctgttcctgcaggctgatttacgccccggacaccaggtacatcacgcggctgcttcagtgttgtcacggcgtggacggctgtgctgatggctgttgtcctgatggcggctgcgatcatattgcgttgcattttctgtttcgcagcagatccggagtcagtgggccaggtgcctcgaggggaaagaccgggatcaagcgtgatacctgacatcgtttttatcatcgtgaccagatccgatgtactgcccctgagcctgtcacctgagcgccaggctttttgcagtgcgttaacgaaatcacttgcggcgcccggtggcatcagaatgacagacaaatccccctgtaacagccgcattgcggcagacacgccggagtcaaccatcctgaaagcatcggcaacatcgcccagcatggaggctgcatcggcaatgacatcgttctggataaaatcagaaatacctgacaacgagaatgtggaaaacatactgtcaatcgcatcgtcgaaaagcccgcctgacgtttccaggcgcttcgccgttgccattcctgccaccggaaaagaaagttccccactttccacaaactgaaaggagacacgacacatgcgcccttctgtactgctgtgagtgatcctgacctgtccgtcaatgctgccctgcatttcgccatactgcggatggaccagcgtaccagggcctgcggtttcaatggcaccaataagacgatcccgcctgtctgcgtaatcatcaccgacaagataagcatttatcgtcaggcggcgcgtggcgcgacctaaatcctccgtccagggcttatccctgttcggatattcatgtacctgtacgcggcgtccaaaggtgctttcatcatcttcaacggagaaaggcactccacgaaatgatgcatcacgcaggcgcccgcgccagccagttgaggagaaaaaagccatatttaccccataagaaaacctgccggagcaggtttatcgtgatgtacgaaagggtgagtaacccacatcatggctgatgttcatcaatggattaccggatttcggtatatcagtcacacgcataccttgtggtgcattctcaaatgtcactttgagttcgctgcgctgcgttgatggcgggacagctcgctcgagtacgccagaacgccgggtcagtggcacataaggttgataacgcccctgcggaatcggggtgtccataccaagaagctctttgagtctgggaataaaaccgttatacccgcgttcacgctccttcgtttgcagcttctgtacagcgaatgcgccagcatccatacccgcatcctttgccccctgctccagatccttaagctctttaaagagtgacaccgccacgccaattgtcagcgtcatggcccccatccggccaattttacccagcagaccggaaagccgtccggccagcaggacggactgctgcagggcaccaatggtcctgacggtaaaagaaccagccataaccagaccaaccccttcaatcaccgtctcccatccgcccatctcctgcgcaacgttatcgacctcctgccataccgccttaatcaccggagcaacatcgtcccagttctcaatgatcagcatagcgccggccaccagcgccgcaatggcgactttcgccggagagagattaatgacactgttcaggattttgacagcccgggacaggctgccaatggatacgccaacagccagcagcgccgcgccgaacttcgccgcagactgaaccagttcaggattcgcgcgaacgaatgtccggagctgctccaggtaaggcatgaccgcttctgcagcttcgttaatggcgggcaggaaggtatcgcccagcgttaccgaaatcgcattgacgctgtttttcagcagaaccagctggttttctgttgtggccgcgcgggatgcgtattccttctgcatcgagccgccatattcctgggcatcagccacacgatcaaaattggtgcgtaacaaatccaggttggtcagcagcggggcaatcgcgctaagtgactccttgccaaacagcgcattcatgacggcggcctgtttagcttttggcactttcgcgagcgagtccagcaccttcagcatggccccgcgcgaatccttttgcatatcctcagcgagtttccggggattcagcttcaggaaagccatagcctgtttctgggctttggttgccgaattacctgcggttaacgacagcatgaagtttttgatgccggtggaggctatctccgattcaacccccatcccggcaatggtggcgcccatcgcggcaatttcgccggatgccactccggcaacaccgccaagcggaccaatccgcgtcacgatatcagaaattttcttcgcatttgccgggccggtattccccagatagttgattttatcggccaggacaaccacgtcttcctgcgtcagtctgaacgctgtccgccactgcgccatcatctgaccggactcttcggcagtggtatcaaacgccacacccattttcactgcgtcgttcgcaaactgcatcaaatcgccgcgggcaatgcctgcctgcccgcccgccgccacgatctctgcaattccctccgccgccatcggtaactgtgtggacagcgtcaggatatcgtcactcatctgcgcgaatgcttttttatcatccaggccgtcaaccaccttccggatgtcagccatttttgactcaaagccgatcgcagcattcacgggcagcgccagcgccccaagaacagcggtcccggcagcagcagcaccgatcgccagcccggccatttctttctgaaatcccttcagttcccgctgcatccctttcagcggacccgataactggtcaacggcagtgataatggcctttaactggaaactgtcagccatgcttcatttcctcattgatacggacagcctccaactccagctccagaaaatcggatatcgccgcccgccggagctccagggggtttattcgccagaagtatgcggtgttgtagacccgctttctgagtcctcctccgtctccgaccgggtaaaaaattgaggatcaacatacaggctttgaaaatatccagttttgccagttgcgctgccgaggagcgtggaatacctgccagcacagggatatatttcagcgcaaccgaactgtccagccggacgccgccgtcaccggaaacggtgaacggaaaaccaatggcttcgatttcatcgtaggacggttcgcgcagctccagcacatgaagcttttcgttatgcgccataatcggctttttgagcacaagttcttttatcactggtaaaatccctcctcaccgtggaactcaagatccacggtgccctcttccgggttatggttggcttcgccgtgcagccaggcgtttgagagaacatacacctgaccatttgccagctctgatgtgatggtcataacatcagaagacgtaattttatcgaccgggaagtttttcggcactttggcggtcaccttcgtatacggtgcccggctggtttccttgtagtcaacggaaccatccaggccaatcacgtcgtcacgaactttggtgttcatggggacttcaatccctccggttaccgacagttgctgtccatcgattttgaaatacgttgttcccgcaatttttcccattatgcagcctcctcgctatactgcagacggaactggttaagcactgcaaacacacgtaactgattgacataatcaggcggaaacagcacatccaggcggttcgaatcgttcgcgttacgctccactatcagatgttgctggaacagatcgaagttttccacgatgccttcccgctccatctggcgatatgttgatcccagctcaccacggataacggcaggcgtgacaatggcctgaccagacccgaaacgcgtaccatcattagcaagtttatggcgcccgtatttactggtaataacagatttcagacggcgcaacacataagcactggtatgcagcgtctcgctgtcaaggtagctgttatccgccacaccatacgcatttttcctgtacgtcgtgatatcccgctgaatacgcagcacgccgctttccacatacgccgttgccacaccgtgggaaagtaacgtctgctgttcagtcgtcgtgaaacgtttgcctttcggtgccggcagcatgtccaccagctccccggtctgggtcgggcgcgccggatcgttacggataaaaaccgcagcacgggcagtacggcttgcagccagttcatcagcaggcgtctgggtgtctttctcatagcccgccagggtgatgtgctgcaggttaaactggtcacccgcggccacaagctccgacagagtccccgtcttcgccgtataaacgtgaccatacaactgccggacataactccagcgaccgctggaatcattcatttcagttgccatcgagttcaccgatgccgtgtcgttaaacggaaggccgatataatcgaacggctcatctcccatcgctgccaccgcgtcgttaagagctggcgcaccagcccccttcacgccgctggcaaccgtaatattcacacccgccggtaacacctccccaccgccaaagccgtaataattgagagtgaccggaatttcatttccatataaccccttgtggcgcgcagtcagtgtcaccacccccgcttctgatgttgccgtaaagggaagatcagggtttgcattgaccgcatccttaatgctcacagccaccgccgcagcgtcatcaccgctggtcacgggagcctgaacgcgggttcggccggtatagacattcaccgttccggtttccgtcgcttcgccagttaccgtcaaagcgacggttgctgccgcgcctgtggattcaggtacggcaatgacatacagttcgccaaatggatcggtcttacggtacgccccgaccatacgggccagctggcttccggcaccgcaaatctgacgggcataatcaaccgatgacaccagaacaagactgttgacggcaattgacgcatcattgctggcgtgaccaatcagcagtgatgccccgctgtcccgggcggtatttgccgccgagttatccatctcggcataaaacagcggaacccgtgtatctgacgggatggaattaaaactaatcgccatttgttttcacctttttattcgtgcgccggacatcaccagcggcctcgcggcgcagccagtagttattctcatcaacatttcgacctccttcaggtaaaaggtcgccacgggccggatcgggaaccgatcgcccttttgcgggtttcacaaacatggtttattcctgaaatgtaatttcggtgtggtgctcgatgtcgccatctggcccggtaccgggttcgataaaatcaacatcaatactgagcgttttaagatcgggcaggccgtccagatcatcctgctggcgggtgtctgtttcggtaatttcatacttcaccgtgaagtcgaactggtaatacagttcgtggcggttcagatcgagaagcatcccacccgcatactgaatttcatgcacctgcgaatccggctcccaccccagcagcgccttccagatttcctgcctgacgtcgtgaactgcgtcgtaagaagcccactgccctttttcatcccgttcgttgctgagtaccacgatgacggaaaaaccctccgtcaaatcctgccagtagtcggtctgcgatttctgctcacccgtgacgtcttcggctggcacaacatacgcggctggtagtctgagctttccggcctccggtatcgctttaaactgcgctgcgccacccacacggttttcaaaccgagggcaacggctgcgaagtgccgcaataatcggggttaatttcattttttcttccttcgctgaggacggagtgattttcgcaattcgcgggagagcacataacgtgtccagctgcggcgtttatccagaacctcagtcatgtagttgttacgtggttccacacgccagccgctgccgcctgatgcgccgcgatgatggcctttcttacgtttcgccccacggcgaacaccgtagaacagaaaggcggggtaaaaggcaccgttgatatgccggttgccctcgccgtttttctggttaggcgcgatcttcaccatgagccccggacgtttttttgacgcacggggtacgtagtagccgatagaacgcgccagctggccggtgcggtacgaggggttttcgcctggcttcgagcggccacgtttcatgaccagtcgccgcgcatcacgcatgtgcacctgaccaattttgacgaacgcccgtcgcattctcgcccggttaaacaccagttcttccggctgtacgaaatcaacgtgtaaatatgctttctgcggcatagtcactcccgttatcggtacccagcgcttcgcactcgatcaacagaaagcggcgtttaccgttcagatcacggacccgtttaacccgataagaaatatcgtcgtggagcacttcatgatcggcggtgataccgcggcgaaaacggatggtgaaatagtgcgtcaccctgttttctatctgcacagacccctgataagctgccgcaccgggttgcgcttttttggcccacgtccggatctgctccgggtacgtcggcgttacgccaaagtcatcagccggaacatcgacacgccgccggataacaatgcgctggtcaagttcgcccgggtcgggcaaaaggtatgtggcgctggtctgcgcctgacgaattttcattgtggaaagtacctgtatggaccgacaagccagccaaagctctgtggcatgtcgagtttttccacttccgtgacggaagatcggttttcgtagaaatgactgataagcatcaacatccccagacggatatcatcctgcaggagcagtccgtcaggatcgctgtccggaatggtttcatccggcgcatagagcttccggttcagatacgtctccgtccgcttttgtaccgctctggccagcagttgcaggtaacgctcatcggcttcaaaatcctcatccagccggagttgagctttaatttcttccacgctcagaagcatactcagccctcttgactggtcgtggattttttctctttcaccgctttattgctttttgcactggtttcgcactctgctaacccggtctgaagcgcaatctcctgcacccgggccgggagtatcctgtcgtcgtgttcaccggcacgaatgatttcaacacgcagaccgtctggcgaccatttgagatcttgtttcaggatcatgattccctcacctgtcagaacaggggcgccgttcagcgccccaccagtgattacgccgcagcgattttcagcagcttgatagcctgtgaatcgaccagcatacccccggtgcgcttggtggtataaaaaccgacaaacggtttgttggtgtacgggtcgcgcaggatgcgggtgccgatacggtcaacgatggtgtaaccccgtttgaagttaccaaacgcaatggctttcgcatcggcggcgatatccggcatctgttcgttttcagcgataccgtaacccgccagtgaggatggctgtcccagttccagccccggacgccacagatagttaccctcggtatctttcagcagacggatggcaaacaggctgttgttgttcatcatgaacttcgcgccggtacgatgcgccttacgcagcgtgtaaatcagcttaatgatggcatcagcggtcaccgcggtcgcttcaccggatacgatgtgctgaagtttaccgaacgcacgagccttatcggactcttcggtggattcataggccaggaaccctttcggcttcttggtgccgtcaccagtggtaaaggcaatttcctcctgttcggcaaattcggtcgccagttcactgttgatccaggcttccacgttgaagaaggcatcatccagcattttctgggtggcctgcgggttgccgtagatttcccccatgaaaggctcaatcagtcccagcctggaagtagcggtctgggaacgcgtgtcagtttcgccgacccatccggaagccgtaccacccagattcaccagttttttatagtcggaaccgcccacggtgatcaccgtggcctcctggcgcatcaccacctcatctttcagcaggctgagaatgctgcgatccagctcttccggcacggcataaccaccatcttcatcagtgcccacctgcaacgccttacgctccagatcgcgcagaccgtcttcgcggcctttacgcagaaagccgacgaaagcgtctttatgttctgcagccaccttgttttgcgctccacgtgccggacgtttcagctcaagcagctctttttcaaggtcgcttttgagattttccagctcgctgagtttcccgttcagggtttccacctgcccggcaagcttgcccttttcctgctcaatcgcctcaacgcgcttgtcgttctttgctttgaagtcgtcaaacttctgttgcagttcctgcgcgacctgttccacatctttaatatcaaccgccatcgtatttctcctgattagaagttcagatttttcagtacattcagtgcagagcccacatcctcagcgtcgcgcagggacagtgcgccatagcccccggccatgaatgctttggcctgggtacgggagagtccgacatcacgcaggactctttcgatttttttctgttcggggatttccccgcgggccagcgcgttcttgacgtcgctgatccgtgcctcatcgtttgacgggaacgtcaccagactgacttcccagaggtcgatttctttcagcagaaaggcttctttgctccggtcgtattcccagtctttcagtacgtacccaatagaaaggccggttaacgaaccggccttcatgtgtgcatgtgcacgttttgccaggggatcatcatcaatgagcaatcgccccttaacgtaaagcccgacatcgtcttccttcatttcggtgtaaacaccgatgggctcatccatgcggtgctgccagagcagcgcaggtaacgcttttctgtcactccactcccgcagggaagcagcaaatgccccggacatcaccacatcatcgtggctgtcctttacaccaaagacggagccatacccttcaaactcaccggagtcacttacagatttaagactcagcggtacatcaagacgttgtttcgtctgcattggcgttatccttctgcttaccggctttactgccatcggagggtttcgtggtcatgttcatcggtgtgagatagacatcaccaccgggacgcggattcatatcttccaggtcgcggcagtcattgggagagtaaatcccccagttgatcccggtggcataggcttcaaaacgggacttcatatccccacgcagtaacgcccccgcgttaaatttggcgtaaaaaacgccctgcttactttttcgtaccagtccggtgttgatccgctgttcgatgcgggtcagatacggcaccagtgaatagttgataaatcccagccccagctcttcaatattgttgaaggtggcgcgatcggtgttctgcaccatgtgcaatggcacccggaacagacgacagatttcttcaagctgaaacttgcgggtttccaggaactggctgtcctcggcgttcagcgccatcgacttccagtccagccccatctcaaggatcatcgggcggtgagcattaccaagcccggtgtgacgctcctcaaaatctttcttcaggcgctcataagcctgatccgacagcgtctgctctgtacgcaacacacccgacgtcaccgcgccattgctgaacagtctggccccgtgctcttcggtcgctgccgccagcgatattgcctcgcgggcataggcgatgggattcagccccaccagtccgtccagcgtcagcgtgcgcacatgccagatatcctcctggctcagtacatccgtggagccatccgggaatgtgacctgatagaccggctcccagctactgttaagcttcggcaccacgcaaccgggatcgacgggcagcagttcagccacttcgccaaatgctttcactttgtaggcataaaagttgccccgcaggcacagacaggtgaccaccagctcccagaactcctgcggcgtcatatagccattgggatgcgtggagatcagcttatgcagacgttcgccagtggctctctgtttcaggctgccgttcaggtgatacaggttgcagggcaacatcccgaccgactctgccagcactctgacgcaggaaaaaaccgccgtcagtcgcatggcccgctgactgctgatctgctttccggtataggtgtcgtatgacagcccgatagcatccgccagctctgctggcgtggtcaccggcgcgtcactttttcgttgaaataatcccgaaaagaacactatttacctccgccgacagactgctgtgtacggtcgagatatcgcgccaccagccacgaccagaacatgcacagcgccccggcaacaacaaaacccgccgggggataaatcagccaggcaccatacgccagcaaaagcgcacccagcacgcccaccagaggcgcgagaatcagcatgatcataattacctcagttaaagcgagcggatcccgtaggactcaatgtggtcagacagcgtgtcttctttctcgtacagcatggctctgccaaccgccataatcagtgcaactgcaccatcgattttattttccgcctgctccttaataggcttcaccacgtcatcgttacccggaatggttttgccgaccacgttgccgatacaccaggtcatgatgggattgccgtcatgatgaaagcgacccgattcaatcgccgcttccagttctttcatcggatcggacatgttggtgtaattctggatgatagtgacgggattcaggttttcatcagctagatcatgtgaaagcccggtggcaccaaatggatcaatgggggattcgctgaccgggttcagtttgttcgcagctttggcctcttcaaggatgtagcggtaatccacctccgcaccatcagttactgtcaaaaagcccatttcaacccatttctgaaaacgttccgcagtacggcgatcctcatttttctcaacactgtagaccgtgtcatacggcacccagaaacgtggcgccacgctgtaaaaatgcgttttcccgtctatttcacgggtaaataacctcgccatgctgttcatgtccagcttacgagccagatcgaacgccagtacgcagggttgaccctcaaacagttccagcgtcagcgtcttatcctcacagttttgccaggaaaccagattaaagaatgctgtgcgggcggcaacccatacattgagatgcttcgttttgaacacacccgcatggcgggcattgttaatagcacgctgttgctgactgagaaggaagtcacggtatactgacaccccaatgttcgggtttgctttctccagcacttttggatctgtccagtcatccccttcatcaaccgtgtaaatcacgccaaaaagttcgttgttcggcaccgatccgttcagcatctcaatcacttcgcgtcgcttgtcgtaacacggcccctcgatgttgtagcccgccgtggttattgcccacatcagcggctgtcggcgcgcgcccatacctgtaagcattgttgtgtagagcgcatccgtagggtgttcgtggtattcgtcaactattgcgcagtgcggtgatgccccgtccccggggttgccgatcaacggctcgaagcgggcaccatcctccggacggttcaggtttgaggcattcacctctataccgaatgcctccaccagtagtggtgtgcgcttacacatcagacgcgcgggacgaaatacctcccacgcctgtttttcagtcgtggcgccggagtatacttccgcaccgaattcgttatcacaggtgaaacagtagagagctacaccagctgaaatagccgatttcccgttcttacgtggtatctctgtgtagacctcacgaaaacgacgaagctttgttcccttctgtacccagccaaaggcacagcacacgatgaaaagttgccacggttccagggtaatcagcatacgtttgaacgcccattcaccttttgtatgtggaagtaactgaataaactttgcagctttctcagccatgtctttatcaaagcggtaccgaaaccttttactcttctccgccgccatatcatcaatgtgacgctggcaggcctgaatgacatactgacatgccgtgatttttccccgcacaacgttgcgggcatactgattagcggcgttaacgttgggatatgatttccggctcatgagttgatcatcttcaggaatgggttagatgttttcttctgtccggccagaccaataaggcgctgtcgactactggggtcaaggcccagcatagaaccagtagaactcatctccgattcctgttctttcttggcagtaagttcagggttctttattttcccccccatagcgccagttatggtgttaccttcttttgcgatattttttactgctctccgccagaactcgtaggcgacacaccagcgctccagtacagccaaatccgtaacacacagcagtccctgaccacacaattctttggtggtcagttcccacataactgatgccagaggcatatcttcttcgttaaaccagtccggaggagaaaccccatttattggtgtgaatactggttcttctttattcagggctcgctttccggggttcccggccagctccttgcgcgccgtaggcttggggcgacgcccggaacgccccgccgttccagccatatgcggcactcctggttaaatttcatttttcgcgggtataaaaattcgagggggcgggcagtccggaagacgtcaggtcacagggatttgacccgccccttccctcagacagttgagaattattatcacttcagacgctcacgggctgtcttagccttatggcatggccagcacagactttgcagattactgtctgtatccgtgccgccatgcgctttgggaataatatggtcgacagttttcgcctcacgtaccacaccggaacgcaggcacaactgacataaacctttatcacgcttcagtacacgcgcacggataacgtcccacttcgtaccataaccgcgctgatggcgggattgtcctggcttgtattgtttccagccctcgcttctgtgactttcacaatatccggatggatctgttgttgtactgcgacagccgcgaacacggcaggctttaggtgttcgtggtggcatataaactccagtaaaaagccccgcgagtgcgaggctaataatttgtttaaattctcagtgtcagtctaacttaatgagttttacaggcttctcacccgcttcggcacaccagttgttatattcgtgcacggctctcatcaattcactatcatagtgactgaccttctctacaaggtcagtaagagattgtgggtcaaactcaacgagttctggtgggacgcgattaatatcccctttctgatgaagggagtaaacggatgatcgtaaatcccctatagctttcatccgctcagcatgaagcgcttttattttttcgttgagtattttgcagcgcccaattgcttcgtagtttagttcagacattccggcctcctgttttcaggggttacattttaaccgatagctacagcatcatcgcagacactcagggaacgcctgctgtaatgtactaactggattaaccggctgtaatcacaccatgccgggtaaatacatttgcacttcattcactactcgctcacgagcaacgtgaagcaatcttttccgcccaccaacgccccacttagccatttgacttgcgcactagcttatcgctttggtttccgtgttgatgatgtgatcgattctattcagacgagacatggcaccaacgccgagacggacaaccgttttgaaaacttcataaacttcgatttcaaattccggcttaatccatgctgcatatctgattgccagtagttcaacaccccacacaccagaatcaaccccaccctttattactttaagtggttgaatttctttcaaagctcttttttgagctttggcttttagtgctgaaatgaaccgtttaatctgtgcactcctcagaaaattactggggcgttgagattcagttgcctcgccatttgcaactgctgctgcatgaagatcgtttaagttgtagcgtccgtcctcatcaacacgaacggacacaccattgacaataactgttgggtacttcatcagtgatcaccttttagtgatgaaccttgtcacacaggattccggcccacagaaaggcaccgatcaccaaaccggcatcctcaagggtcatcctgaaaggttctgtgttcagaagtcgcgcgtgtgaagcgcatttactgcggatataaaaacgccccgcattacgaggcattttcatgaaagtcacttgtcaaatttctatgtgatggaaattatttcaggcactgtgttctgatatagtcctgcgccccttccagttgcttttgcattgttgtcactcgctctttgagggtgaaataatcccgttgagcggagtctgccagtctggggcgggctgcattatccacgcgggcggcggaggtggatttacctgtcgacactgcgggacaggtggcgttgacgagcaggcgacgacggccagcggcgacatcatcgcgcaaagcatcattctcagctttcgcatcagcgagctcctttgtatatcttgcatcaagggcggcaacgtcacgctggcgcacctccatatcgctgatagtctcgttcgccagcgtcagactatgactggcggtatcacgctgcgatttatactgaatggcgttgtcgcggtaatggtctgttgtccatgcaagtacagcaatcagcaaagtcactgagagttgcaaccagtattttttcagcaatacaggtaacagattcataccagcaccgattttgctttttcaaagcgctctcgcctgtcaccgatgccgttctgccctccgttaatgatctgcgtaacgcgcaccaggtcgccggagtatttcagacaccctctagtcacaaaaaaccacgctgcggaacgggcggcatgacgatccagttcaagctgtcccggattcgccaccagatccagtttcagggcaacgccgcatctggtgtaattctccagcccggtaatctggataagcccacgcccgcgatacttccagccatctccggcgtctttgttacccatgcggccaccgtaaactagattggctatttgcggctggtgggccacctgcttaccatcgacacgccccagcatttcacactgatacggcgtcaggcgtttaccaaaggttttcatcagcccatctaccgagtagttgaagctctcgaccagcgaggtaaaaccagcagattcatgcccaacttgtgcaatgaacatggcctgatccagtggtgcagtaataccgaattcgctcattgccgccgtaatatgcggataccagcgcgcagaaagcccggcgctaataccagccgcctgctgaaattgggattcattcatgattaaacctgtggggggttaccaccgccaaagcggttactgaaatacgttgaaatgatggtgctgattttcttcacgccgataaatccgatagtgccgccaatggctattgtcagacttttcggcacatcaaaataatccagcgcagaaaccgccgtcagggtcagggaaccacacagcaacccttcaaacagcgtttctttccagctgctgccgttatagaccatgcggaaaaacgcaacaacgattgccataacaacgccgccaatgggtacgtctccccgccaccagctttgaaaaagttcgatccaactgtcccacgaatggggatcaaagtgcattttcatgacctccccctgtccgggagactgtttacccgggtatcgggtgagtggaaaaagaaaaggccgccaaacagcagcctgtgaatggttgccgcgcggtggcggcgttttccccggtttgatattgttgattcgccaaaaacacaacgttaaacggggtaaaaatgagtaattactcagaccttttccaaatcatcaagatcagagtttgccagaacaatgatttcccaacttattcactggcaggaaccaataactaccgcgccagccaggtatggtatcgaatcggacagatattcacccttgaatgcgtcctcgctgaatacagaagatgctgctcatcagattattacctgctggacaacgaaaaggcacttcaccaccttatttttcaaatcacaaagtggaaattggaggatatcagaggattatctcttaatgacagtctgtttattatttcagacaggctaaaacctgattacatgccagcagaagctgcgcaatttctccgctcgctgaaactgccagtcaatcattattctgttgacgatttctcggaagcggactgggatcccagagaaaactcagttttcctttaaaaccaccagcagacattcgttcaatttctgctgaaatctcatttagccgttcctcaagggcggctttttcatttaccagttgattatagtaggtcaggtgaagtttttgctgccctaaccagtcttcaagttgttcgggcgtcatgccagggttaaaaaaataaggctgctgtttaccatcttgcattacaggctcccagaaacgcaaaaaccccgcaaaggcgaggtttcgtaattttaattgacttgcttttcgtcgctgccatcgcggcgcagctttgccaagcatggctgaatcatagactttttttacctgttttcaagatattttttcattttgctttctcattgcatccctgaatgcgagaaatacagcacaattaaagtgattcacacaccatcgcacacggtcttcggcttgttttctggtcaaccacggcgctatctcctgaagatatcgtccgatgtcactcactcgcttacgacgcgcataaaaatcaataccgacgacaaataccggatcgtctttactcagcgccgaaaggatgcacctttcaacaaagtcgctttcttcgatgcgcatttctttattcagcagatcggctatagactgcttcggccacaatatctggcgggccatagacaaaagcgcttcgcctttatatccgatctttctcagccccttgattgtttccgtgatgcgttttgcttcattatccgtccattcttcatcctgcaggcaactccagaacccacagcaatcaagcatggcctcttctgacgttctccctccgtaacattccccccagacagacagtaatgatttaacccacgcactctggactgacgtaagcggcctgaattttcccagccagctcttgcgcggcgcggcagcggctttttctattgcgttacgatgttgacggcgttgacgtggtgtcattccttaccccttaactcagtacaccaatcgccagtgcgcgatcgataaaacgaaatatcaactccagttgagagccgtatttctcttcgaatgccacggtgtccgcatgtaactcattgtgatgcgttctgcacaacggcagcacaaagaggtcatgcgcctttgttcccatccctccctgaccgtggcctatcaggtggtgcggatcatccgcctgcttcccgcagcaggcgcacggctgggatttaacccagcgggtatatctctcattgacccatcgacggcgtttcggacgtaacatgaagctttccggcgattccggatcaaccctgagcgccagtacctttttcgccttatcctgtacaatgctggtggccagcaccgagggaacaatttcactttcacgggtagctgactggacaattgccttcggcatccttaatgcttttctcgcagcgctctccggtaagacttctgccaggttattgcgtaccatccaccagcacagttccgggagagtaactgcgtgcatatcgtcaaaacccagatcacgacaaacaaccgataaaacccattttgtcgtgttctccacagctattgatttcagccgttccgtaaactgttcgcgcagcaggttatcgcagtgccagcacagtcggattgcccccggagcgtggcgcatggttgtcatctgttcgctgtgccagtctgaatgcggccactgacagccattcccccggagtagccagctttccagactatccagaccaccagcacgatagataaccgactcattacagaacacatcacgaacagcaggatcatccgccagcggctgtgataccgccgggaccgcgccgctggcgaaagatgaaaattgctccggctctggttcaagcagaacacgcccctgcataaacaggggcatcagttccgatcccggcctgaacaatacaacgcccatacgaggagcaatttcaggggtcagtaacgctctcacgatcacctcaatgaacggtatcgagcagcttcagcagctcagggaatttggactcgaagaaatgcggctgcgtctcgcgagggtttgccgggctggtgatgtttttgccgaacatgcagcctttcgccgtcagcgaccagaattttttaatgccgttaatcgcggagcgactgtaacgctcacgatgttcaacaacacccagctttgctaactgctgatacgcctgattagccgtcatccggataccatgctgttttaacagcgcgctcagtgccagcgtcgggcggcttgaaccatccagcgcgccagccggagcatcaatggcatattgtggcgccaggttaggtagtcccactgcctcctggagtttctggcacgcgcccagtaccgatgaattggacaggtttaactctttgcgcataaaacccagcagaatcacccccgcctgcatcttatcggcagccataccagaagatgtttgtggcgcactggtaatccgatcgaacgtgcggatcaccttgagatggaaagatgggctgatccacattgcataagcaaacaccagttctttgcatacgtatgtaccttgttcagcaccaccgcgaacagtatttactggagcgatacccaaattttgggtatcactaccgccctgaaaaaagctaacggattgattttgttccgagggtggaattccgccctcggtgaaaagttgctcaatcagctcacgggtttgcttattatcaagccagtatttcggacgatatttctgctctccaccagcagcacggtgcaaatcgttaagacaatagcgcccatgaacgtcgcggcgaacttcgataccatcaatgaccattaaattattcatgcttctttctccattttcagtcggctgcacccgcccctgtttcaaatttcgtgatcgtgatttctaccttccccttcgggaaaactggtccccactccaccagcattctctttacctggctgtcgtcctcccagactcctgcgtgagtcagtgcgtcgaacagcgctttgttgtaattgtccaaatccctgatccgcttatctggcggatacaggatgatttctaccgctgctagttcagtcgatggcttcgggagacgtcgtaattgctcaatgatcgccacgcaggcagcgctctggtatttacgaccaacagcgctaatgaggtgacgaccggccagcggccccttgttaggggcgcgccagtaagtgttcacgctcggagggaatgggagtaccagcctcatgcaacctcccgccgcatgctgctgaccagtccaccagcagtagtaatgatttcgctggttggcatacgctccagccacagctggttaatgttcgctttcagcttgttctgctgcgatgcgtccagagaatccgccccctcaacctggttgaacaccagaccaacctcaagcggccagatacgcgaatccacataaggtaatactgctggcgctataatgggttcttcttgctctggcgccgtagtggctggtggctgaaccttacccgcggcaaattcgaccagtgacatgaacgccttccccttttcctccagttcggtacggctgatgtagctgaaacgctcgccgcgccatgacttatcgaagattgcaatggcgccagcaaagaatgcaccagtggtcttctgcttatcgtcggcagggacaaaccacacggggagatcgaagccaatacgaccgcggataaacatgatgtgatcggcgtcttccggccaccacgtttcacttgttgccgctttaacgaggaacacatagcgaccgcccttttcacgcatctccattgtgtgatccatgatgtgggtcatgccggtgatcgcctgcttctcgtggtactgagagcggctatagggtggattaccgaatgcggcaccgccgattgattccagcatttccgcccaatcttgtaccaacgcgttatcatcggcggtgtaccacacagggcacttagcgttatcgtcgtcagcaaagagatccagcgttaggggaccgaacatcgcattaatgccccaaaaaagcaggtctggtgtccgccactgatcgccgacttctttcagttcgtgtgctgatttgttgcgcagttctgccagcgcctggcaatatttattgctcattaagaccccacataattccctgacagataccactcactacctgatgcaacagactttctgctcttccgcaaacaccgttcacggcgcgccagaaaggcgctacgttccgacgggatatgactctcccggaatgcctccatccataccgtagctgcacgacggaacaaccctcccgactccagtgtttctgcctgacgtatcagatgcataatcacctgcgggtcgttggttccgacataacagctccgcacaggtttagtcccgatatctggctcctgatccggctgtatgtctgtctcaagagcaaaatgcctgcgagttttaccttcaaagcgatgagcaacacgcctgcactggcgtaacttacttgtcgactgcaggacgcttttacgcgggaaatctgcgaaagcattcgctatatcgctggaagtacatcccggatgggattcaatgaatttctgaacgtctcccataagactcatatcaccccctgaaccctgtcgggatctggctgtaatccacattcccgtagctggatttgaacatcggatcttcacgtccaggactaggtgcagcaggaacagcccataactccccaaaatgacgatcgggaccaaaaaacgtggtggcctgtttcacgaattgcgtgccgctgttccccgttgcagatacccatcccgcataacgctttacgccttccagcatggtttcagcatttaccccctctttcagacgggctttccaggctttgtaggctgctgattttgaatttccacctgcacgttttggatatgccaaccaggcctgctcgaactcaggtgaatattcctgccgggcaaaacagactgacgaagacgcgtaagcagatgcgccaatggtttttgattcattgactggttctttgactggttcaaaagagtgactggttctgggtgaatctccttcactaccccctggtgcaactcctgcactacctagtgaatttgctgcaccaggtaatgaattatttgcactcccccctagtgaatctcctgcaccatccagatgaaggagatagatattacttgagttacctttttcacctttccgggtgactttttttaccagcccggactcacaaagggccgcaatatgattcatcacagaacgtttgctaatctcgcactggtcagcaatatgctggtagctgggccagcactcaccctgatcgctggcattatcagccagcttgatcagaaccagttttcgcaatggattacccactcgaattttcatcgctttaaccatcagctccatgctcatgcagcacctccgagatgcttcatgtttttgccggaacgaaaggcaataagaggcatgttgacgcggtaattacgcccaagaggctcacagacaaccttctgacattcgcgatcgaccaggctaatacgcagaacgtacccttctggtgtgctgtaccactgtcctggacgagggcaatgaaaacgttggctggtgaaccgcttaaaaatattccggatcatttgcgcccccttacctctgaacggttcagtgtcatattgataaggctcgcaagcgccacagcgtcattgatgcggtcgtacaggcttacggccagcggagattccgctttttccagcatgggataaagctgctgtaaccagacctgatgaatggatgaaatgtaggaataaagaacgctggcattatgtgctgcatcgctcagcaccgatggaattgaaagttgtttctccatctggttaaaggcattgatgtatgcctctttgaattgggcggcgcgtttgcccgtaaaacccattgccaggaacgcaaaaccatcgcgggtgatttgatagcatgggagtttgcgggtaccgccgttgggctgatttattgaaatcgatgtaaacgcaaaattgcgttgacgaaatagagtggaacattcgagagattctattttacggataacatcagcgtgacgcttgatgaagtagtcggcaacagccagggaggaagtaacggcttggccgttaataattctaatttcaggttgagcgagggttgggacagtagccatagtggcagcctctatgttgaattcaatgaactcaccaccaaggctttccacgaccttataggtggtgagacgtacaggggtggaaataccggtcaacatagaacccggcccagccgaaactggccctgcacgccccaccataatttgggcgtagcaatgctcatgacaagaaaaaaccgcatgagcgcggttgtgctctatattgaattccgggtttccacgcccggcacccgctttatgaggtgcctgaacagtgtaacgtcccggaattgcagaatcaatgtgttcctggcgcttcacactcaacaaaatcacgcctgaatttccacaaagggctaaaacactcatgcggatagcccttgcgcagatagataacgcgctcagtttctggttcccagcgaatgacatggacataaagtccccttccatcccgaaaccagcggttaagttcctgcacgattcatcccccacggtcaggctgtgttccctgtggttacgcacgaccagactatttggtaatctgcattcatgacgcaacggccggtactcatacatccccggttgttgcgacaaacggttatttaccgttaaactgttcatgcgttggttttctccataaaatttgacgccacggcgcccggagctgcacactcgcgggcgtcacccttttctggcgcgcaaaaaactctgtataccagtgtcgaatgctgttgcagctttgcgatcgcctgatacaactcctcatcaatcacggctttttcatgtggctcaataacgccatcttcgatagccaccctgatttgctgggaataactggtgatctgctcaatcgcttccagcaggcgctgattaatatctgcgttatccacttcttccatatctgccagcggaacaaaaacgccacctgatgccctggctactgaatgtgccaggtgataggttcctccggcacgttgcagtaccagcgcccacccaatcgggaagatctgatcaccaccagtacgcaggcggttaaacagagcatctttggtgacatccagccattccgcagcttcttcataaccgccatgcagactggaaatcgtctttttaatcgcagccaccagccagcggggctgcttttcaactttccattcaggttcatgtcccacggatctactccttctgcagtggtggcggtcaaatcgccgaatcactaagctgatatctgtttggatacaaaatttgcatctcgctaatttctccggcgtaaaattgagccaggcgctcagcaagctctgttgaaggagcctgctcgcatctttcaacccggcttaatgttgcaggatcaacctgaacccctttagcgacgtgctgtaacgtataaccatgcgatttccgcaattttctcaatggtgattgcataaaacctccttcttttgcgtatatcgcatgttatttcatacagcaaacttgcgcaagttgatttgcacaatgcgcaaaaaattaatgtaatgaacgcatgaatataggaaaccgtgtcagacaacttcgccgcgcgaagaacatgaaaattgctgagctagcagaagccatcggcgtggatgccgcaaacatctctcgtctggagactggcaagcaaaagcaatttaccgaacaaacactttctaggctggctgactgcttaggtgttgatatagcagaactctttacctcagacccaaaaggtaatactgtatgtaaacacagtgatatgaggaaggattcagctaacgtgaaggatttgttccgtatcgagatactggatgtcagtgcaagcgccggtaatggactcattcagggcggtgatgttatcgatgtaatccatgctatcgaatataacaaggacaaagcactagctatgttcggtgggcgccctgccgctgagcttaaagtgattaacgtgcgcggtgacagcatggcaccaacaattgaacccggagatcttatttttgtcgatataagcatcaaccagttcgatggtgatggcatctatgtctttggctttgatgataaaatatacgtaaaaagactgcagatgatccccgataaattattggtgatatctgataacactaactacagggaatggagtattaccaaagacaacgagtgcaggttcggtgtttttggcaaggttctgataagccagacgcagtcactcaaacgacacaattaatagaaagcgtcgacaaggccaccattatggtggctttttttttgactcaaaattgcatatatcgcaattttacacttgcgcaatgtgcaatttaaatgtaatttgcactcatagagcagcgaacaggcaggacgcccacgaagtagccgccggtggcatacgaatgaccggatgattcgctgacatgtgtcttcgggaggggttgcggaactgggttgaccaccagcaacagataactcagccgacaacacggagccgtttaacccacggcgtcggagtgtaaataccgtaggggttgtaccgactggtcatcggtgccccgcccgaagatacctgtagccagtgcaagcgatattctggcggcccgttccattacgttagcggaaaccgccagctttttcaggagagcaacagataagagtttttccgcgcggtaaagcgcttctgttaagagagagaactcttatcgttgtggtgaatgcggctcagcgcacgcgggtaaggttgaagctgatagtcgatcctctgtagttaagcacccgtctggcgtgcaaccttcgccagataccgggaggcacccggcaccacaacgttattgctgtgtgaagtcttgtcggcgtccggctcttccaacaacaggaggaaggcgacagtgttctgccgtgacgccgacctttttacacaacagaaaagagtatctccgcgcgacgggctcattacccaatccacccggaaagctgttacagcaggtgctcttttctgttttgtggagaaaccaactggcggtggcaaccgccatcttgaggggttaacgatgaatgatgaccgcatgaccgtagtgcccgactttctgggcgaactggatgccggcgtgttcatgaacaaaatcgcggcagcgctgaatactgtcggattaggcgttctgaataacggcaataaaggcaaggtagtcctcacctttgattttgagcgcatgggaaattcagtcgaagagaagcgcgtcaaaattaaacacaagctgcagtacagcactccgacgccgcgcggtaaagcgtcagaagaggacacaacagaaaccccaatgtgggttaacaagggcggaaagctcaccatactgcaggaagatcagggtcaactgttcagtattaaaggcactactgacggaaagcttaaagcggctcagtgaaccgcagctaaccaattcactaccaccactttgatcattagttaataaggaatttttatgtctcagttagacagcggcacttttcagcaggtaaaagacctggtcctttctggctatcacctgaacgatattcaggggctggcttgcccgacagcattattacctgccggaacaggtgttgaaagcctcgaacgctttgctctggagcgtttccgcttccgcggcgccatgactaccaccagcattgaagactttgtccgttattcaaagggctatgccagtacaaccgaaaaagcacgctgctttattgatgctgaccatatgacagctcgctcagttttcaatattggtacgctggataaccccggtcatgcagacaacgttgcttctgtcacgctgaaacagactgcaccattccgcgccctgctccagatcaacggggaacgcctgaaacaaaaacagatcgccgaatggcttgaagactggagcgattatctcctggcgttcgattctgacggtaaaacaatgcagatttcacaggccgcccaggctgttcgccgcattacgatccaacaggcaacccagcaggatcatgaagatggcgatttcagcggtaagaaatcccttatgcaaagcattgaggccagcagcaaagacgttatgccggtggcttttgagttcaaatgtgttccatatgagggtctcggtgaacgtgcgttcagcctccgcaacagcctgttgaccggtgatgaacctcgctttgttctgcgtatcgtacaactggaagcgcaggaagaagcgatcgccaatgaattccgcgacctgcttatcagcaaattcgacggtgaatcagtagaaacgttcatcggtaactttaaagcgtaattgctctgcattaaatccccggcgccgcggggatttattgaagtgtaattctgttaattatcgccacccggcgagggattcgcacaaccaaaattcacgcggtgcagcgcgaaataaattataaggagaaccaacgatgagttttattcaaacactttcaggtaaacaatttgattatctcagcgcaactattgacgacattgatattgaagatatcgccgtggcgctttccaatatttgccgcttctccggacatctccctgaattttatagcgtggcgcagcattccgtactgtgcagccagcttgtatcaccggagtttgcctttgaagccctgatgcacgacgcagccgaagcgtattgccaggatatccctgccccattaaaagcgttactgcctgattatcgcgagattgagaaacgtaccgatcaactgatccgctttaagtttggcttgccactggaagaagccagcgtagtgaagtatgcagatctgaccatgctggcaactgaacgccgcgatctggatattgatgacagtattccctgggtaatactggaaggtatccccccgacagatttattcgaaatctacccacttcgccccggtcaggctttcggcctgtttatggcccgctttaatgaactgatggagctacgccaatgtgctgcataaaagataaagagtctgtagtgaaggcaatcagatcaagacttttgtgggagcgcgttgaaggcggtgcagcatgaaactggaaatgtacaccctggacggatcggtgattgttgatagcaatctggtaacacagttctatccagactacaaaagcggcggcgagttaacagtcatcgagactatttcagccaccggagaaactttcaccgtgagggttaaacactcgtttcttcaggtaacaagtgcgctggctacggcgtggagcgttgatgaaaagaaagctgaaggagcagctcaatgagcaaccgaattcgcaatgctcaggtattcgacgcgcgcaccggtgagtacccggtttatatgtacattcactggatcattggtggtgaacttgattttgatgccaattatcagcgcgggtatgtctgggggcatgaagagcagcaggcattcttaaacgcagttatttctggttttcctatcggctcagtggcgctggcaaaggcacctgactggtgttcgcgtgaacttccttacatagaagttgttgacggtaagcagcgtctcaccactttgaaaaaattcatcaccaatgagattccaatcatcctagctgatggtccgctttactggcgagacatgactcgtgcggagcaattggtatttgggcgtcgtccactcccagcagttgtgctggatgaggtgacgtacaaggatcgcttggcttatttcatggtggtgaactttactggcgttccgcaaagcgaagagcacaagcgacacgtaatgcaactaatggaggctgcccaatgagcaacatcgacaaacaggcgctacgagagcgctattcaccaaaacctgcacctgaatgccacatttgcggtgctgaaatgactatacagcgcatgtctgccagtcgaattacctatggctgcacgggcgcgacatacgacgataaaggttgccactacgcagaaggccgcagtatcgcagatgaccattatgaacagtctcgcgtcaccgtagttgatgtgagtgacccgaatgtgctggcgctgctggatgagctggacagcgccaacggttacgtcagcgcatacgaggctgaaaaatggcattaccacggactggctgagtctgagggggagcgggcagacagagcagaaaagcgcgtggccgaactggaatacatcgcgactgattacggtgtgaaatttcagaaaacacaggacgcgctgaaacatcaggcgctgttgcataaatcgcagatggaagccgcagaaaagcaagtggaagaattaacgatgtgggttaaacgactggccaattcactcagaaacaccaagccgaacagcaagttatacggtgccgcaatggactatttgagccgtaaaggattaatcagtgtggaggatgtattgagatgaccactattaccaaagaatggctacagcaaactatcgctgaatttgaaaacactcgcgacgatattccgtttggtctcgacgatgatgacgccaaaattttgttggtgctgaagcgggcgctggcatcgctggatgctgagcccgtgcgatacctgaataaattttccggtacatgcgtgacgttagagcagcagtcaaacgctgcagatgatgttgccgtgtatataccgctctacacagcaccgccagcgccggtagtgccggaagaggcttacagcgacgactgccctgacttatacgccagtcagccggaagcttgggctgctggctggaacgcttgtcgcgctgccctgcttcatggtgccgaacctgtaagccaaacttacgagttgccacaaacgcagtttgagcaggttgcagacctctacgaaatgcaatttgatgatgggcgcacctgcgcattccacacagatggtgcaaaagctgctcagtggttgctcgcatgcgatggtaataaggtgcaggaatacgtcaggcttgagcgctatcatgaggctcttattggtaactctccggtaattccggatgattgggttatggtgccgaagaaactaactgctgagaacggtgccaagagtttgctatccggtgagtttttagaaactacttttataagctttcctgaatgcttggccgacgaagaatgcgaaagctgcgacggcagcgggagaattaaaattgaggttcctgtcagatggacgacgattaaggctatttggaataaaggcgttgaacattttcgtagcagcaccgcaacaggggacaactaatttatgaataacttgatgatcgaccttgaaactatgggtaaaaaacctaacgcgcctgttgtctccatcggtgctgtgttcttcgatccgcaaagtggtgaaattggacctgagttctataccgccgttagccttgaaagcgcaatggaacaaggtgccgttcctgatggtgataccattctatggtggttaagacaaagcccggaagcgcgagcggctatttgcgctgatgcagtatctgttacgaccgcgcttattgagttcaatgactttatcacctgtcacgccgacgatttgaaatacctgaaggtatggggtaacggtgccaatttcgataacgttatcctgcgtggcgctttcgaacgtgccagcctcccctgcctgtggaattaccggaacgatcatgacgtccgcacgatggttactttgggtcgtgcaatcggcttcgatcccaaacgtgacatgccgttcgaaggcgatatgcacaacgcgctggctgatgccaggcatcaggcgaaatacgtttcagctatctggcagaaactgatcccgcccaccagcaacaatatctgatttaaaccgggtgcagccggttagatggagaagcaactcatgagcgatcgcttcctgactgaggaggaactggaagatgctacaggagcaagccagaagtcactccagaaagaagtattaacgctgaacggtatttattttatagaacgccgggacggttcaatcagaacaacctggtatcatataaatcacccagtttcgcgccttcttccaccagcagggtatcagcctgtaccaggcatgaattttgacgctatagagagttaacatgggtcgcaaacgtgcgcccggtaatgagtggatgccaaagggtgtattctttcgcccttctggttactactggaaaccgggaggatcaacagaaaatatagctccagctgatgcaactaaagctgaggtctgggtggcttacgaaaaaaaagttgagggtagaaaaaacagaattacattcacacaattatggcgaaaatttcttgccagtgccgattatgctgatctggccccaagaacgcagaaagattatctggcacatgagaaatatatacttgccgtatttggtgatgccgaagctaaagcaataaagccagaacatatccggcgttatatggatgcccgtgggcaaaaaagccgtgtccaggcgaatcatgaacacagctctatgtcgcgcgtatttcgttggagttatcaacgtggttatgttcctggtaatccttgcgttggtgtggataagtttcctaagcctcaacgcgatcgatatattaccgatgaagagtacagagcgatatataataacgcaacgccagccgtcagggctgcaatggaaatagcttatttatgtgctgccagagtttctgatgtattgaaaatgaactggaatcaaatactggagaaaggaatttttattcagcaaggaaaaaccggagttaaacaaattaaatcctggacagatcgcttacgtgatgccgttgaaatatgtcgtgaatggggagaggaaggccctgttatcaggactatgtatggcgagcgttattcttataaaggatttaacgaggcgtggagaaaggcgcgaaaggctgcgggggatgatctgggacgtcctcttgactgcactttccacgatctaaaggcaaaggggatttcagactatgagggaacggcaaaagacaagcagaagtacagtggccacaaaaccgaatcccaggttcttgtttacgatcgcaaggtgaaaatgagcccaaccctggacaggaagcgttgagcttttcgatgtgcgccagttaaaattctggcgtttttttctcaccgaattttctcattttttctcaacgtgattttcatcactataagaaaatcacgtaagtgcttgaatagtggcggagagagagggattcgaaccctcggcggagttacccccgcaacggttttcgagaccggtccgttcagccgctccggcatctctccgtatattgcaatgatgccaggtaatttggcattttaacagaccctattcgggtaattttgttcaagtgacgagtttacgagcaaaacgatgattaagtggccctggaaagcacaagaaataacccagaacgaagactggccgtgggatgatgcgctggctatacctcttctggtaaacctcaccgcgcaagaacaggctcggcttattgcgctagccgaacgttttttgcagcagaaaagactggtagcgctacagggatttgagctcgactcgttaaaaagtgcacgtattgcgttaattttttgcttaccgatcctggagctcggtattgagtggcttgatggttttcatgaagtgctcatttatcccgcgccctttgtggtagatgatgaatgggaagatgacataggtctggtgcacagccagcgtgtcgtacagtcggggcaaagctggcaacaagggcccattattctgaactggctggatatccaggactcgttcgatgcttcgggtttcaatctcattattcatgaagtcgcgcacaaactggatatgcgtaatggcgatcgcgccagcggcatccctttcatcccgttgcgcgatgtggctggctgggaacacgatctccacgcggcaatgaataatattcaggatgaaatcgatcttgttggcgaaagcgctgccagtatagatgcctatgccgccaccgaccctgctgaatgttttgccgtgttgtcagagtattttttcagcgcgccagaactgtttgctccacgtttcccggcactatggcagcgtttttgccagttctatcgccaggatccttctcagcgcttacgggtaagcgctgccgaaggcgactacggcgaggaatccgaacattaattcctcactttgtgggttaattaaccaattgaattggcgcgttaattttactgttgacacgttatagccggcccagtattatgcgcctcgttgaaacaattcctctgtagttcagtcggtagaacggcggactgttaatccgtatgtcactggttcgagtccagtcagaggagccaaatttagggaagcagacgttcactgacgtctgctttctgcatttatatcaactgattaaccccttcttcaggttcactctcgtttactaaaaaccactcgaagctatacccttttgctggtaaagctggttcgatttgcgttttaccagcacgcggagggaaccgtcatgtcactgactgatactaaagtaaaaaatgccagaccagcggaaaaggccgtcaagctcgctgacgggtttggcctctatcgattcaaaatactggcagtcaggctatcgctttaatggcaaacagaaggtgttttctattggggtttaccctgcggtttctcttgctgatgccagacaacgccgtgacgaggtcaaaaggctgctggatcaggggattgacccgaacgcaaaaaacaggctgatgaaaaaatccttcaggaaaagcgcgataaaacccgctcgtcccgtgtcgtcgccaaaagctgatgcaccataattctgcctatgatattgacggaaaacttttcgcctgcaccagaaatttatctgccatttccgctaccggcgtcagactgcctgtatcaaccattttcacaaaatatttcacgtctaaagttcattctactccctgcccttaatctctacggcgttatgtctcagaattatttgccaagtgcctgccagtttttcacgtttcatcagacgctggtacatagccattgcggtaaggtcacagcatttgacttgtgcaattacagacaaagttgcgccatgccggagcaaagtaggaattagatcaaaacttcaacgctttgttgtttttgtcagcaaacaaacgcgcaaccttatttccccctttgacaagccgatcgcacatcgttactatgcgccccgttcacacgattcctctgtagttcagtcggtagaacggcggactgttaatccgtatgtcactggttcgagtccagtcagaggagccagattttagtttcgggacatcctggcgagtccggagacgtttaaaaaacaagaaattatctttacccggttgatctgataaggtttgccgggtttttttgacatccatagtttttggggcttaatcgggcctcacggttcgttgagtaaatggagccccctcctatggcattaaccgataccgctggcggcacgcagaccgatccgggtacaggaaaaccgtcagaaaatccacccgccgctcccaataagcccactccaccgaaagaagaaacgccgcccggcgcgccggagaaatacgcgttcaccgcccctgaaggtcaggaactcgataccagcgcgctggcgcagttcgaaccagtggcgcgtgaactgaacctgacgcaggagcaggcgcagaagctggtggacgtctatccgaaagtgctggcgggagtgcaacaacagcaagcggagtcatggcagaagcaaacagaagactgggctgcggcagttaaagccgataaagacattggcggtgacaagctggcgtctaatcttggcgcagctcagcgggctatcgacacgttcggtaccaaagaactgaaagagtatctcgatggtacctgcgccagatctctggtcaatgctgcaccgtgacggaagcgattccacccggcacctgttaccacatcagcgccttttactttacgggctgcggcctgcaaagacgtccggctttgctgccgcgtgaccgtcaatctgcgccagaatccgcgatctttcgcgcccggcactcaaccggtgcgtcactttcgtcgcgcaaagcgacaaagtgacgcacaaccactacaccgcgccatgcccctgttttcggggttccggcgttcattcccgaatctgacacgcctttttggggccgctgtcagcaagaaagaagagaaaaagatcgataccgaggggggggctgatgccccggagaatttctgctcacgcaggcagcctgtaccgcgtacagtctgaaactccctatacctcaacaaactgccactccggcgtaaaggtatcgttctggcgcagccaaagagcatacgccggagactgttcgtgttctcaaaatcacaggagaagtgtatgggcaagttaggtggtgaaatgaaggcactggcaaagcactgtggcggtagccataaaacggtgaacgattgcattcatatcgtgcagcgtttcgatcaccacttacgggctttgaacgtccatatccagcgggttgcgcagattaaggtgcgccacattgaaagctatattcatgaaaggttggcgcaggggatcggcaaacgcacgctgcaaaatgaaatggcctcgctgcgcgctgttctgcaacaggccgggcgtaaacaggtggcagagcatgagtggctgactaataaatcgctgggtctggctggtgcatcgcgcagcgggacgcgacaggcgatcacgccggaacattatcatcatgtgctggagacggcccgcatgaaagctccgggactggcggcggcgctggaactggcgaggctgatgggcttacgttcacaggaagcggtgcagagcgtgcaatggatctggggcatggggacgggcgtgggcggtatgtggcgcaggtgtatgggcaaatttgacagctggctaagagcgagcagcggatggagcaggttaccaccgttcacagttagtgaaagactgggcggaggtggtaaatatcaggctgcattaccttcccccttacagtccaaacctgaatccgatagaacgaatgtggaaattaatgaacgaacatgcccggaataatcgctacttcagcagtacgcgagagttcagggacgcaatatctgtcttttttaaccagacgctgccggatatagcggactcactgacatcccgaattaaagatcactttcaggtgctcactcccgcatcttgaggtttattgggtatataatcgttaataatcatcagcgcgttattatcaaattaaaaacaacgcgctcgtaatacttaaattattcttactggtaactgaagaaaactctctcctgccagaatatgctcctcgcatcctttacattaactctttgtttctatagcatgaaataagtttcagggagttattattcatacaaggagaacatcttgaagaaaatattcataacaattatagtttcattatattgcgcgaatatatgtgcaaaacaatcccccagtacagaatccaaacccgttaatttcatcgcccaaattgaaaatatcgattttaataaaaccgccattagcagtgacctgaaacttttactcgccgaccgttattattttaaagataaaacaccctgtaatactaataccctttctgcgcgcgcagaatcaatgggactgacgacagaagaatatattaataaaatacgcagtttaagaccggctattctcgatgaccgttatttttacctgacggtcgatcagtgcgatgctggcggcacgcccatgctgactggaatcgagctatgtaccgaagcgctgtgcggtgccgaatacatgaaaagatcgtctgacttgtggctggatgatgaactgcaaccgacggttaaacgtcaggcaacaacagtagtccatatgcccctcccctatgacaaagagaaaaaattatggaaagtcaccggctggtatctggaatcctcagaagaaacaggggaggtgatgcagagtaaacagatagcctttgaaggctataccaacgaagaaaacttcgctaaccgacaacgtgtttctgtatttaaatctttctatgaaagcggcaatctcaaaagtatttatcattataatgcgcaaaataagcgtgacggaaaagctgaaacttactttgatgaaaaagacaaaatagcggaaacgctgacgtttaaagatggtcaacccgaaggggaatacatcgtataccatgaaaacggagccgttgaaagtaaacgttactttgcccaaggtaaaattaaagatggcgaatgcccacatttttatgataacggcgttttaaaacaaaaacacagctatttaaatcagaaactggaaggcccggcatttgaatatttccctgatgggaaaataaaggggaaatattcatacagtaaaggcaccattgtcggcaccagtacggaatattattctaccggtaaaattcgtggtgtttaccacagaaataaccaaggtgaaaacgacggaacgttcgaacaatacagtgaagagggcaaactcctttctaaagcgacctataaaaatggcaaacagctttctgctcagagctggtatgaaaatgggcatcccaaagaagaatcctcttttgatagtgaaggccgtaaacatggtgcggtcaaagaatggttcagcaacggaaagcctgcctcatccaaaatgtataaacatgatgtgttagacggggatttcgaaaagtggtacgaaaatggtcaccgcgaatcagtctatccctataaaaacggtatgctaaatggggacgctaagcactggaatgaacagggcaaactcacctataccaccgaatataaagacgataaaaagcagggagccgatcgccgctggagcgaacgtaccggtaaacttgttgaagaggttatgtttgctaatgatgaaagaaacggcctgaaaagagagtttaacgatcgtacgggtaaggtcttaagtgcgctgccctatgtcgatggcgacaaggaaggtacagaagaagcctatgatgaagacggcataaaatacatccgttgttaccacaacgatgaagagctttcagagctatatgcgccgactgacgtcaccaataaggcaaagcagggtgacagcactgcgcaatatcatttaggtaagtatgagtttgaatgcacaaactacgatgcggcgatgaaatggttaactcagtccgcagagcaaaatcatcccggcgcgcttctctttttggcctatgcgtacaacgacggtgatggcgtagcgcaagacagtaaaaaatatctctcctatttattcaaagcggcagagcttggcgaaagtgatgcgcagttagaagtgggatatttaaatcttatcggcgaaggaatgccgaaaaacctgccggaagcctataagtggattaaaaaatccgctgaccagggaaatgctcaggcgcactataaccttggactcatgtacaggaatggtgatggcgttgagaaagacctcaacaaagccaaacttcatcttacagcggcggtaaaaggcggcgtcaaacctgcactggcagccttaaaggaattaacgcctcaaactaagtaaatatgactttgctgtaaagaggctattcaaacggaactgaaaggatacacgttgctatgaaatttaaattcgccacattactcacagccgccacggttttttactcttatcagagcgttgcacaaagtcagcaatcgcctgatgtctggtcagttgtcgaacagaaactgcaaaatgccgtccctttaaatgaaaacaccacttttaaatcgcaggcagcctggtttgaattacacagggaactgtttatgtacggcccgatgagccgtgcggatgcattactgaaaaagctggacacacaatcgaatgatgcgaagttttcgctaaaccatgaggcctcgtggatcgctgaaaataatagcccggatgccgcgatggttttcctgtccaaaattggtctcgataaaccgtcgagcattaccgcctacgagagctacgttgatggctgggttaatcgcaaacagcctgaaaaagccttagcccttcttagcaaaaatgccgacgcgaggaatttttatttagccacggttttagaatcctgtcactcagagcctgataaaaccgccgctatttataatgaaaattacgctgataaaattgttgttccttatactcagctaaaaatgctgcttattattgcgaagcagtaccatgccaagggcgacaccgcaaaggcgttggtttacgcagatagcgcgctgaaaatgtttgatacggctattgctcaacaaccgagtgctgaagcctaccgttatcaagagtatctcgacctgatggagatctattacgccacgggtaataaagagaaggcgatggcgttgtctgcgagattgcgcaaagcaaccggcaataaaggaagctatttccagtattcattaccgggattgctctctttttataagaaaaacgagctgacacagaattatcaggagacgctttcaacctgtgtgacgcaggtcgataaaatattcaattttgccccttcgccgcgcattgaaatggagctgattgatttattaagcaagcttgatgatgttgcgctgatgaataagcgtatcgatttgctgatgagcgcgccggaatatacctgctacgacgacaggtattgctacgagtacaaaatcaaagcgctgaagaatctctttcagcataagcagaatgctgtggcggaaaagcatatcgcaaccctctccgccgaggcgcaaaccctgacgttcgccgaatgggaagatgcaacaaatgaaataggtgaagtactcaaagaaattggccatcctgaggcagcgcaaaaattagccgtcagcgccgaggcgatttacctcagccaagcaaaagcctggcctgatgaagatatgtcgcgttcctttcaaagacttgcagagctttacggctatggcaacgacacggtgaatgccaaacgggtgttacaccagcacgttccctctctcgaagaggaggcgatgatcgaccactacatgaatgcaaaacagtggagtcaggcaagggaattgatgattaacgcagatagggtcgataataaaaacctgatgctgttacgccagatttgttctgaaaacacgcccgagtgtcaggaacatattacctttacgctgaaaaaattaaccacgcaggcgtcgattacccgccaggacgacaccggtaatcagcagctttatcagattgggaatatttttcacagattgggtatcataccgggagcggaacagcaggcgctgattcaggcgttgtataacaaggccgcagagcctaaaaaagccacgccttaatcgatttacccgcccggccacctttctcacatgcgggaaggcggcgggcgggaaaaatcaatcgcggaagtttttgaactggaacggctggcccagattgccgccgcgcatcagcaccgtcgctgcctgcagatcgtcgcgggatttaccggtcacacgcactaacgtaaattcgaatccaaacccacagagattaccgcaagatattaatgttgacccaacaccgcctgccggaagacccgcgctggaacgccctgcacgaggagttcagctttgacgacgacgacaacctgctgggcatgaacatgccgcccgaaggtggcgagcatcaggcgaaagtcaaaggcgaccgcctgctgctacagggcagaccaccactatgagtacgacgagttcggcaatcccatcgctgaccgctggggcaaggcgcagtgccggaagcaccgatttgaatggaacggcgagcaccggctggtgcgctttaccgacgtgcgccactatgatgatgaaggctttccgcgccactcgtggcgctatgagttcgataatggcgtgaccaccctatatccctgtccgacgcgaaaatcctcagtatcaagccttctgataatccctttaagctgatcgattctcacggtcggtatctgcttgttaatccgggcttgtgggtccaggcgctcaaggagcgtgaagtgcggcgcaatgttttcgccttccggcgcgtttcctgacgtagacgcgattatcggcgacaggtctccggcgatggtgatgaagccgcggcacaataaggccttaacgggatacagaaccgcctcccgctaaggcttcattcagccactttccatatcacataaatacgcctcttccgctcctgtccagcagcaggcgacagctcatttcgttagcgaaacggtggctcattaaacgtgcgtaatttacgtgagtgcaaacgatcaccttctgcgcgtagtaaatcaatagcacgaataccaatttgcaaatgttctgaaatagccccctcataaaaccggtttgcctgcccgggcagtttaatttcaccgtgtaaaggtttgtcagaaacacaaagcagcgtgccgtaaggcacgcggaagcgatagccctgggctgcaatcgtcgcgctctccatatcaatcgcgaccgcgcggctaaggttgaatcgcagcgccgatgcggaataacgaagctcccagttacgatcatccgtggtgacgaccgttcccgtgcgcagtcgctgtttcacctcttcaccgggcattccgctaaccgctttggtggcgtcgtacagcgcacgctgtacttccgcaatgcttggaataggaatatcaggcggcagaacggcatccagcacatgatcatcgcgtaagtaggcatgggccagcacataatcaccaatcgcctgactttctcgtaaccctccacagtgcccaatcataagccagacgtcaggccgcaacacggccaaatggtcgcaaatcgttttagcatttgaagggccgacaccgatatttaccagcgtaatcccctgcccatctgccgttaccaggtgccaggcgggcatctgatgcttcttccaggccagatcggaaatagcctcttccggcgcttccgtttctgccgtgatccaaattccgccggcacaggaaagcgcgatatagggactgtcaggatcaagaatttggctgcatccccagcgcacaaactcatcgacatagcgggtgtagttggtaaacaaaacgaagggctgaaaatgttcaaccggcgtaccggtatagtgccgtaaccgggccaacgagaagtcaacacgacgcgcgtcgaagtgcgatagcggatagaattcgccggggtggaacagaccgtctgccgtctcatcgccaatctgcgccagttctgtggtaggaaaatggcgcgttagcccggcgctcatagaacgatccagcgtcagagccgagccatcgatcacataaggatacgggatctcatggtgcgaggcctctaccgcaatatgcgcgccataatcatggtaaacgaggttaagctgttccagaagataagcgcgaaatagcgcaggccgcgtaacggtagtggtataacagccgggatgagtaaagcgtccaaaagcgcgtgttttaggcgggttcggtgtcgcgccatcccagcttacagacagcgaaggataaacaaacagtccgttaagcctggcgtggggatcgggcagcgtaccgttatcaacatagtcagcgatggcttcacggagcgcgttaaccgactgctcgtatagctcctccaggcgatccagcgcctgctcgggcgttaggtttgtgcctttattttccatattattctccttagcgttcacaggtgaggcacgtcattcgatagtatgacagcaaaggaggaaactaaaggggttagcgtaagggtggcgacagtaaacatgaaccctttaaaaagaaaagagaactatcttagcgccaccatcatcgctcaaaaagaagggtactggtacagccatttgttaagttcattacaattagtcatataaccatttcccggcttttgctgactcgatcagcatgctgatagtgaaatctgggacgggtacaggttccgttttcttgaacggatgccatgaaaaagggtgattaggaaaataggtttctattctgaagttacctcgctcgacattgagttcctcgaagaatttattcatgagatcttcggcttcaagttcatcaatgctcagatcagtatcaaggtcaatctctggtgttaattccacttgcttaatgttgaaaagatatgtgccagcataaggccgtacaagctcgtaaacttgctgttcaatattgtctaccataacttatcattgccccgagcaatggtattgtagtcgcgtatagtgcaatatgttatttgtgacacatctgcggcaaggataatttccccgatcaaaggaatggaacgtccaacaaacggcgcaatgttacgaaccataacacgtctggctgtccatggggtgtaaccgcctaaccatgtcggaagggatattccaaagggaaattttgactttttaaacactgcacgtgcagtcctggacgcgtatgatgtgcctttagtcgctccagcgggtttcgcccttgtccaaagattattacgacctgatgccaaagcaacaacagccccgaaatctgcaacaccaatcccaaactggcttgcggtattctcacaaaaaatcataacagaagttcggcagcagtcagattggattttcctgcatagaagtatgttccatttagttcttctactgtatccattagaaactctatagttactattttggtttacttattgtacatccttgtttcgaatgaaagaaatcaatcttttgggaaagaacggatcaagatcactggaaatatctgaaatcagatgaaagagacagtcgcgattcccaccaggggcatcacctggcaagcttgtgtgatcgctccgtttgaaccgaacacatctatatgtcagcatactgatacgggtttgatcttgcggatagcggtatcggttaatgccatacgtaggggctccattttctcagcgaaccgtgaagcctccgattaagcccccaaaaaccatggatgtcaaaaaacccggtaaaccttctcaggtcaaccgggtaaagataatttattgttttttaaacgtctccggactcaccaggatatcccgaaactaaaatctggctcctctgactggactcgaaccagtgacatacggattaacagtccgccgttctaccgactgaactacagaggaatcgtgtgaacggggcgaatattaacgaggtgcccctggcttgtcaaagcctgttttcacaaaaaaagttcgtttgctgctttattccacacttcggttaaaattcaccgtttcctgatgattttcacagcaaaaagcgcttactccctctttacgcgcgggtatctccacagccagcgcccgcttatcagacgccagtaaaacagtgcgccacgcacggcccagtcaagaaacatccccagccaaacccctacaacccccatacccagcacaataccaagcgtataccctgccacaacgcgacagccccacatccccagcatcgatacccacatcgcaaatcgcacatcgcgcgcgcctttaaaacccgacggcaacacccacgcggccgcccaaattggcataaaggcagcattaagccagagcagaactttcactacctcttttacgtcctgctcctgggtataaaatgaggcaaacagacccgcaaacggcgccgtcccccaggcaattgccgtaagtacgatagtcgacatccagaatacatggcgcagttgacgctctgcctgaccaatttgcccggtaccaagacgcttaccggtgataatagtcgacgccgaaccaagggcgttacccggcaggttgataagcgccgccacggaaaaggcaataaagttacccgcaataacgttagtgcccattccggcgacaaacatttgcgtcagtagcttgccaccgttgaacagcactgattcaatgctcgccggaataccgatacccatcacttcccagataatgccgaaattcagcggcttcagatagcttttcagcggaatgcgcagcgccggattaaaaccaatcatcagcacccaaataatcgctaccgcgccgatgtagcgcgaaatggttaatcccagccccgcgccggcaaaacccagcccttgccaggagaaagccccgtaaatcaggatgctgctgataataatattgagaatgttcatcccgccgttaatcatcaacgggattttcgtattccctgccccacgcagcgcgccgctaccgattagcgcaattgccgcagccggataactcagcaccgtcagttcaaggtacgttaacgccagcccctttacttctggcgtcgcctcgcctgcgacaatattaataatttcactgccgaaataatgaatgaccactgccagcacaacggcaaatagcgtcataatcaccagcgactggcgcgccgccgcccttgcgcgtcgcctgtcgcgcttgccgaggctaaaggcgaccaccaccgtagtaccaagatcgatagccgcaaaaaaagccataattaccatattaaaactgtcggcaagccccacgcccgccattgcttccttgcccagccaactgacgagaaaagtactgagcacgcccattagcaaaacacaggtattttccagaaaaatagggatagcaagtggggtgatttcacgccagaacaacactttgtagctcttgcgtttggcataccagggcgtacggacgacagcctggcgtaaggcagtggagacgttcaaaatggaccttaaagaagagagttgaaaccacatttcaataatgagcgagaaatcgtaaggctgcaaagctttttgcagaaaaaatgtctgcaaatgcaacaaagtgatgagataacccgcaatcgaatctgtaagaggttaaatggggtttgacaaaaatttttccgccgctaatatacgaccccacacgattcctctgtagttcagtcggtagaacggcggactgttaatccgtatgtcactggttcgagtccagtcagaggagccagattttagtttcgggacatcccagcgagtccagagacgtttaaaaaaacaagaacttatctttacccgattgacctgataaggtctaccgggtttcttgacatccatagtttttaggggcctaatcgggggcctcacggttcgctgagaaaatggagcccctgccatgacactcactactaatacagatactccagcccatgaaaaccagcaatgcgacaggatatttaaaggccaggcctgcccgcgctaatgttgaccggcattccggaacggcgctccagcacctcattaacccgcgaagtatcaacgtcatcccctttgataaacgtgcgcagcactggcgtaacgggcaatggaacttttttgtctgactcaaattcagcacggttgcgagaaagcggttcgtgtacctccagccaacgactgccatccggctctaccgaaaatttaacgggcctgtcgataatctgaacgcgggttcctacaggaacatggtcgaataaatatttaatatcgtcattgcgtaaacggatacagccctgactgacgcgaaggccaatgccaaagttaacgttagtgccatggatggcatataacctgccgatatatattgcgtatagccccatagggttatccggccccgcaggcaccatcgcgggcagcgtttttccctctttagcatattcccgacgcgtattagccgttggcacccaaaccgggccatcttgtttgcgttcaaccgcagttacccagttgcgcggcgtttcacggccagcctgaccaataccaataggtagcacctcaaccgtattcgtgcctgcgggataataataaaggcgcatctcggcgacgtttaccacaataccttcacgaacggtgtcaggcagaatcaactgctgcggcaccaccagtgtggaaccagactgaggtaaaaacacatccacgccgggattcgcttcaagcatattactcagcccttgaccgtagcgggcggcaaatgactctaagggctgagtattgttctgcggtacggcgattgtgacaggctgtcctaccagacgactgccttcgggcggcaacggatagcttatagccagcgagaaatggcttaccaacaagacgaaaaacggaaaaaaaggtgtgatacgacgcattatatcccttcctttgtcgcggcaggtgtgcgttaagtatagcttttttctcacatggctggtgttgtgcgcccgggttatgttgcgtttgcgttcccctccggcaggacaatattactggccgccaactcccccatgttgtggaacatggcgcacgcggcttccacgatcggcatcgccagcgccgcgccgcttccttcacctaaccgcatcgccatatgcaaatagggttccatagacaaatgcgcgagcgcgatgcgggcgcccttttccgccgaaaagtgcgacgggatcagataaggtctcaccgcaggcgcaatctgacaggccgccagcgctgccgagtaggaaagaaagccatccagcaatacgggtaagccacaccttgccgcgccaagcatcacgccggtcatcccgaccagatcaaaaccacccaccttcgacaacacatcaatgccgtcgcgcggattgggctgattaatcgcaatcgcccgccgcacgacgtccactttattatcgatgcgggaaggcggaagattcgcgccaatccccaccacctcttttgcatcacttcctgtaaaaacgctgaccatcgcggcggctggcgtagtgttcgccattcccagctcccctacgccaaataaggtcacgccgcgttgcgccaggtcgcaggtgtagcgggaaacctccagcaaaagcgcctcagcctgcaagcgactcatcgccgggccaacggcaatatttccgcagccgcgcgcgacgcgcatattaactacgccaggaataggttcggcatcaataccgacatcaatgacatgcaccttcgcaccggcctgagcggcaagcacgcatacgccggttgttccccgcgtcatattcgccgcctgaatcgccgtcacgattttgggcgaaaccgctacgccttcatcccagacgccatggtcggcgcacatcaccagcaccgccttttcacctacctgcggcgtaccgttaagacccggcatacccgcgagctgaacggctaaggtttccagtctgcccaggctgcccggcggtttgagcaggccgtcaatatgttgctgcgcacgcgccatcgcctcggcgtccggcgcaggaatgtcacggagtaaagcgtgtagtgtctgcataagatgtctcgtccgtaataatcggctcataacagagccagcagaaagatcaattcaccaagttcgatcgccgcgcccagcgtatcgccggtttgaccgccaagcgtacgtttaagcaactggccaaggatgaaaatcgccgcgcatgtgaccaccattgcggccaacccttgcataccaggcagtaataccgtggcgacgattaccgccaatcccagagtaatgcaggtttgccgtccgctgactttaccgataaatacattgccaagcccctcttcacgggcgtagcgatgacggtacatcaataaaacggcgctgccgcgtccggccgcacaggccgccgccaacgccgccaacattggcgttccacgtaacgccagttcgctgaccaccagaatttttgccagtagcacaaaaataagcgccagcccgccatgggttcccagacgactatcacgcataatctccagcattcgctcacggcggcgcgcggaaaaaatgccatcgcaggtatcggccagcccatccaggtgaaaaccaccggtcagcagcgccagcgccagaatacagaacaacgccgctagcggaataccacaccagggttgcaggaggatgaaaatcaggccgcttacgccccccagaatcaacccgataaagggaaacatcacgatcccacgcgaatactgctcgaaatccagtccctgcgaccagcgtgacggcacgggcaagcggctaataaaagcgagcatggcccaaaacagcttactcatttaattttgactccaatacctgagactaccagccagacctcatccgccgctgccgccagtcgttggttgacccgaccggcaatatcacgaaaatggcgcgccagacggttttccgggacgatccccattcccacctcatttgtcaccagtaccactttcgccgggcagcgctggcaggctgcaattaaaatctgaatttcatcgtcaatggcgcgctccatcgccgcgtaatcccactgttcgggatcgttctcgcctcccagcgcaaacagcagattcgtcaccatggtggtaatacattccagcaaaatcgcgtcgtcaggggcaagatccgcggtaatcaacgtatcaagatgccgccagcattctgcggtccgccagtgtgccggcctgccatctttatgatgctgaattctcgccgccatctcgtcatcaagaatctgcgaggtggcgatatacagtacctgcggcgcatcgccaattaaggcttcagcatgacggcttttaccactacgtgccccgcccgtcaccagaatcatcataccggctcctgatgttgttgcatgatggtataaattttatcaatatcaatatgttgccgcatcgcttccgccagcagatcaaattgccgcgctttatgatccgcataacaaaaagtcgtttcccacggcgcaagcccctttcgcgcccgtaacccattgaccaccgcacgggtaaaggcatcgctgtcaaacaggccgtgaaggtaagtgccaaacgccagtccgtcggcggtgaccgcgccatccgccacagagcatccatttttctgtaacgtcatggccgtacagcatccttcctgcagcaccgtttcccccatgtgaatttcataaccgcgtaccggtagccccgccgcggcagccagccagccgggcagctcgcctgacattgtcgcgttaacctgcgtcgtggttttatcctgtgcaaagcgagtgattgtattaagcagccccaggcccggctgcgtacccagccccgactccacctcatccacaatggtgtcgcccagcatctggtagccgccgcaaatccccatcaccggcacgccctgccgatgtgtctgcaataccgcatccgccatcccgctttcgcgcagccaggcgaggtcgctcagcgtattcttactgcccggcaggatcaccagatcaacgtcagtcaacgcttccgggcggcgaatatagcgtatgcgcacatccggctgcgccgccagagcgttaaaatccgtaaagttagaaatatgtggcagttgcacaatggcaatagtgatatcacggggggcgttaccgcgatatttatcgttttgcagcgcgacgccatcttcatcttccagatccacatccagccacggcatcactcccaggaccgggacgccggtaagcgattcgatttgttcgataccggaatagagtagcgccacgtcgccgcggaatttgttgataatgacgccctttactctgtcacgctcctgtttatgcagcagcgccagcgtgccataaatagcggcgaatacgccgccccggtcgatatccgccaccagaataaccggacactgggccatttccgccattcccatattgacgatatcgcgatcgcgcagattgatttccgccgggcttccggcgccttccagcacaataacgtcatattcctgcgccaggctgttatagaccgcaaggatttgctcacgcaaacgcggtttatagtcatggtaactaaccgcatccatattggtcgccactttccccatcagcacgacctgcgcctggcgatcgctggtcggtttgagcagcaccgggttcatacgcacatctggcgtgatccccgcggcttccgcctgaaaaatttgcgcccgccccatctctttaccatccggcgtaataccagaattaagcgccatattttgcgatttaaacggcgcggtacgcagaccatcctgataaaaaatgcggcataaacccgccgccagcacacttttgccgacgtcggatgccgtcccctgcaacataactgcctgcgtcatgacgcctccctgaatgcgcacttttgcattcgatgaaaaaactccgtttctgttttacacagcggcagtcccagttgagtatgaagtttgaccagccagggctgggttagccccgcgtgttccatcgcttccgtacacgcgaaaacctcgccaggcgcgccatgcgtcaggatctggccctggcgtaatacgtatacggcatcgctaatttcataaataagatcgatatcatggctggagataatgacatgattgccctgcgccacaatccgcctgatgatagcaatcatctgagtgcgccctgcgggatcgagaccagcagtgggttcatccagcaatagatagcgcgcctgtagcaccagcgctccggcgatagccacacgttttttttgcccatgactcaaacactgaatgggctgatggcgaaaatgttgggcgtcaaccagcgttagcgcctcgtcgacgcggcgcgtgatttccgcctccggcacccccaaattacgtaaactaaatgcaatatcgctatcgatatcagtataaaaaatctgctgttcagggtcctgaaaaaccgtcgcaacttgctggcgcagcgccagtagtccgcgcttgctgtaatccagcggttttccctgccacaacacggcccctttttgcggacgcaacaagccgctcaggttcataaaaagcgtagacttcccacagccgttcgcgcccaccaaaccggtaacaggcgaaagcgaaaaatccatatttaaccctttaagtaccggctcattctgataacgaaaccacaggtctgaagtggcaagcataatagtccttacaggtgaaaatcaccctgatacagtttgatatccagcgtggtggtcatttgctgataacgcattaacacccgcgtaaacaggagtccagccagcatcgccagagatcgatagccgttcggcaggctgcaataaccaaaacgcagcgtttgcgcacgacggattgccaccgcctcatccagaagaataaagagaaagcgccacgttaacaggatttgctcggtaagcaggcgtggaatatgcgcgcgcttaagcaagctaattaactgcggaaacggtaggttcatcaccagccacaacgtcgcggacagcgccgtcaggctacgccagaacgtttcattcgccgtaaccacgcccgcacgggtaatcccgatccagtacggcccaacagatatgccagccagcagcatttgcggctcgcggctgatgctgaagataatcgttatcacgccgaccaacaaaaatccaaaaggtatcgccatccatcgacaccagcgccagagggatatgcgcaatagccaacagctcaatccggcaatgatcagcagctcaatgccctgccctacaggcggcagaacaaacgccagtatcatcatcgccagccacagcaaaaacttgcgctgcggcgcaacgtgtgcccagcggctttgatagctgagtcgatcaagcccggtcatcacggcgttgtttacctttgcaataccccaggatataaaaaatcaccgccgcgccaagagagccctgaagggtaaacagcaggctttcaatttcaccgctggcaggttcatataacggctgaaaccagggtttatactgcggcgcaatagcctgaatctggctttccgcttcgccgtctgaaccgccatattcaccgccatggttaataaaaaacggcagaatcaccagcgccaccaccatcgctaacaacatcaacgtttttttcattttaatgtccttgtacggtaatcacttgccgtttggttaactggtcataaatcatgacggttaataaaccttcagcaatggcgacaggaatctgtgtgaggcagaaaatccccataaacttcacaacagaccctgtcgctccggcatggggatcgggaaacgcaacgccaagctggactgaagtcacaaaataggtcgccaaatccgccagcatcgcgcacagaaaaacggcgacatcacggcgcagtccggcacggcaggccattttccacaccagataaccgacaaccgggccaatcaccgccatcgacattccatttgcgccaagcgtcgtcaggccaccgtgcgccagcaatagcgcctgaaacaacagcacaaccgcgccgagaatcgccaccaccccgggcccgaacaagataaccgccagaccaacgccggtcggatgtgaacaactccccgttaccgacggaattttgagcgcggacaggacaaaaataaacgcgccgcacagcgccagcagtaccttctgatgattatcctcctgcacaatacgccgtaagcgcaccagtccataccacaagcagggtaaaaacagtagccaccaggccagcgcccacactggcggtaaaaagccctccatgatatgcatcgcaaacgcctgttgcgggacaaccatcagcaatagcgctgcagccagtccactgaaagacaactgtcgaagctgctgttcaagtttcattctgcatactcccactgtttattgaccagaatggtcgaaaaatagggcaacggtcgatcatcgttgacctcgtggagatggcgccagcactgctcgccgggcagtgtggcctcggacatcattaaggcgcattccagcaggccagcctgcgccagcaaagctttaatacgggcgaaccggccatacactttcatcaacaccaggctatcatgctgttgtagcgcctgggctatttccgcttccggcgcggtacaagaaataaccgccagcgattgccgttctatggcgagcggcattttcgcgcgggcggctatcgcggcgaaggacgtgacgccggggacaatctccagccactccgggcagccgattcgctggagtaaaaaaatccaggtactgaatagcatcgcatcgcccagggtaataaaaccgacctgtttacccgcttccacctctgcggtaagcgcggcggcaacctcgttccagaccgcttctttctcggcgccgtcagcgctcatagggaaatggcaacaacgtacttccgtctgctcgccgagatagtcgcgcacaatcgacagcgccagactatcgccccccttacgaccggcgggcgcatacagaatgtccagcgagccaagaatccgcgctgcgcggacggttatcaggtcgggcgcgcctggcccggtacttaatgcgtataatttaccgttcatgccgcctcctctaccgccatgttcagcgcctggtgcaaatgcgcgacaaacatcgcccggatagccgggttttctcccagcccgctcagccacggcgtcgccggaatgcccgccgcgttaaagcgcattttccatgagtcgccgtcgtctgaagccatatcattaatggcgtgatcgcccgccaccagcattaatggcatcaaatgtacgccggtgacgccttcgtcacgcaggctgtcgatcaggatgtcgacctccgggtagctttctacggcgccgacgcgcgccggaaagcgctgcgcggtcatcatatgatcgagacaggcataagctgcgaatgcgtgatggctggcgccgtggcccataaaaacgactttctccgtttgtctgagcgatggcatctgttgtcgcaacgcctgcattagctgcacataatcgttatggctgctcaacagcggcacgcccagcgtcaggcgagtgaataacggacgcaagagttgtacttcacggacaattttttcatattcgtcgccgttaataatgtgcaacgactgaatcgccacgtcctgatatccctgtgcggcaagcttttgcaaagcctgtaatggcgtatcgatgtcgataccgtcacgctggcgaagcttgcgaatgatcattccggaagtgaaggcgcgaaacaggtcgcgatcgggacaggacgccgccagatcacgttcgcacgccacaatgtttttttcacaggtgtcgtgatagctggtgccaaaactgaccaccagaagcgcttttttcatttttactccttagctgcggccagccagcgcgataaacgctgcgcaaaggcggcctggctttccagtaactcatcacccgtcacaagcggcgtcgggcgcgcaataacgatgcaaggaatgcccgcatccagacagggctgaactttttcctgatatcccccctccgcgccggacgctttggtaatgaccacgtcggcccggcactggtggtaaaacgcggcgttaaaatcagcgctgaacggcccacacagagcgaaaatttctccaacgccgaaccccagttcgctgcagcgttgaatcacctccgccacgggcagtacgcgcgccagcaacgttttttccgccagcccggcacgccagacggccagatctttactgccggtcgtcagtaacacgcgcggaccaaaacgcctcgctatctcgcaggcatcggcaatactgcgcgccgtatagagaagcggatgcgtcagattgctaagctgctccggacgctgataacgacttaacaacacgcctgccgtttcacaggcgcgaaggaggttatggctgaccatttctgcataaggatgcgatgcatctattacccagcgagtacggttttcttttagccaggcgaccatctgcccgtactccagacgaccacagcgcacctgccctttaatgtcgcccgccagcgcttttccggctggcgtcgccacggataaggtgtacgcgacgttcgccgcatccagttgtcggcataacgcgcgcgcatcgctggtgccgcccaccaccagcacatccccctcattcacagcgtgtaacctcgcggcgttatcatcagcccatcctgaacataggtcgttttattaccaacgatgaccagactggtcatatctaccggttcaaaatccatatcgccgagcgtagtcagccatttttcctctttcttacgtccggcggatttcaccacgccaaccggcgtttgcgcgcttttactggcggcaagcaggtcaaacgcgcgcgccagatgcccttcgcggccgcggctgcgcgggttgtaaaaacagataacaaagtctgcctctccggcggcaacaatacgtttttcaattaccggccacggggtcagcaggtcgctgaggctgatatgacagaagtcgtgcatcagcggcgcacccagcagcgaggcggctgcgatactggcggtcatccccggaataaggcgaacctctacatccagcttctgcttgctcaccagctccagcaccagtcccgccatgccgtaaataccggcgtcgccgctgctaatcagcgccacgttatgcccggcctgcgccagctcaatcgccgcctggcagcgttcaatctctctgcacatcccggttttgatcacctgcttatcgccggtaaaggctttcaccaggtgggtgtaggttttataaccgacgacgatttccgccgcctgaagcgcctcaatcgcctccatcgtcatcattgcctgcgaaccggggccaataccaattacgctcaacatcagtgtgcaactcctaaagtaatagtgacgccctgttctcgcagggtctcgcctaacaattgtccctggcttaataaccacgctgccgggccggatacgctgccaacgcccaccgtttttctgacgaagccagaaccgggaaaatggtgttcgaattcgcgtaacgcttcggcggtaaaggttttaaaaggcacgcggcagcaggaggcgagctgaataagccccggctccccttttttgagcgtgacgctgccaatcgcttttaacgccagcggatcgagtttctgcgcttcaagctggcgcgccagtaatgtcgctaacaggggaaatggcgtatcgcggcggcagccaattcccgccaccacgcgctggggcaccagtttccagtgcggtacgggaagctcagggaggtcattacgcaaagagacgcagataagcgcatccagttcaggcagccgctgcaaatcatcaacagggataaaaccgcgaatatcacactggccgatctcttccgttagttcggcatcccaccataaccccacacgttgatgactgaccaacatctggttaacggtttttaccgccgttcgaagatcggacatgcgggcgttaagctggaaagctaaggtgtccaacgcggacatctcattgacatccgttgccgtggtaatcaccggatcggcgcctaacattcctgccaggtagcgcgtcaaggcattggccccgcccgcatgaccggaaagcaggctaatgacatgctgacctcgttcatcaatgacgaccaccgccggatcgctgaacttgtcgttcactaacggcgccaggacacgaacggcaatgccggtcgcgccgataaaaataagcgcggtataagtggtaaaagcctgccgggcggtattagcgaatccgccatcgaagggaataaatccctcttcccgcagtttttcactggtaaagcaggttaacggcagcatcgcggcgagtctctttgccagcgccacgccgccgggcgtcaggcaaaacaacgcaatggattcaggctttacggtattcatggctaaagtccgctgcataaagtcttgagtagtgatactccttacccagaaaattcccgaccaggattagcgccgtcttacggatgccagcatcacgtactttgtcgctaatatccgctaacgtgccgcgaacggtctgactttccggccaggtagccttataaatgaccgcgacaggcgtagttgccggataaccgccggcaatgagacgttccgccacccggtgaatacgctgaacggagagataaatcgccatcgacgtctggtgactggcgaacgcctccagttgttcgcgcgccggtactggcgtacgcccttccagacgggtaataatgagactctgcgatacctccggtacggtatattccacacccagctccgccgcagcgccgagaaacgcgctgacgccaggcactacctgccagtcgataccacggcgagttaactcctcgccttgctcacgtacggagccgtacagcgagacatcgcccgtttgcaaacgcaccaccgtttttcccgccttcacgcccgccgccatcagctcgataatctgctcaagatgcagttcggcgctgtcgtagcgttctgcctgcgcggggcagtaatccagcagttcggtattgatcagcgaaccggcatagataactacctgcgcctgttgcagcaggcggtagcctttaagcgtgatcagctcgcgatcgcccggcccggcgccgacgaaccatacacagcgtggatcaaatgtctctgacatggttttcttccttctgacaggcgataacaaaaacaggattgttcggtttgaaatagtgccccgcccccagcggcgttaacgatgaaagctgaagctgtacacagtccattcgacatgcgccgatgtgcgcaagatgcgccagcgcgctatgaaggttttcctgcaagataaaggtcatcaccagacggccaccgggatgcagatggcccatcgcccagtcaatcagcgccgtcagatgtccgccgctgccgcccataaacaccgcatcggctttcccggttatggtcattggcgcttcgccggggagaatatcgatattgccgcaggcaaagcgctgacgattctcatcaagcagccgtagtgcggcaggattacgctcgatagccgtcacctgcaacgaaggaaattgcagcgccgcttcaattgagacgcttcccgttcccgccccgacgtcaatcaggtgactggcgcggtggagctcaagtttcgacagtgccagcgcccgtaccgcctctttggtcattggcacgttctcgccgcgcagaaaaagctcatctttcatcaaggatcaccactgcattcatttcatagtcggcgttgaccgcactgacgggtagccagtggatccgctcattttccatcgccagattttcaccaatcaccattaagcgatgccctttgccccgcgcgaccagttcccgcgcgatttctcgcggcccgcagcgggcatccgtgaccatcgccactttgcgatggttcgctaactgctcgaagctgacgcaacgaccgtggctactggtcaaccacatgtcattcatatcaattccagcctgtgcgcacagatactgtacggcgctgatgccagggataatgcgaacctgttcgataccaaaatgcgccaccaggcgtgtaccgatgccataaaacagcggatcgccggaggccagcaccacgatccctttatcccgacgggcggcaatccatgacaacaacgcgccaatatccgcgcccagcgtaaatcgttcgccgccaaacgccggaaactgcgccaaatgccgtttaccgcctgccagcgcatcggcgtggtctatcgcttccagcgccgcaggcgtcatcaaatgccgtccagcgggccccattcccacgaccgttagcattgcagctccttagcaatctcgtcgacgggacgattactgccgagaatatggttatcaaaagaaaacaggatggcgtcgcagacaggcggcgttttggtaaaacgcagcatctgcatgactcgcaaacaaatacgcctggcaagatggttatagatatgcccgaagccatatgcttcaatgtgctccattgccgcttcggtggtatcgcaatcgctgaccagggtgagtaactccagcggcgcgcccagtaaagctaaatgcgcgaccagcgtttccatgcgcgcatcggcaatatggctatgggtatgaaagatcccggcggcgattttgatcaattttccaggatgacccaccagcactatctggcaaaatcccagccgtaccgcctcttcaatcatgtagccgacaaaattgctcatggtgacgactgcctgtgtgtcgacgcccatttgttcgcgaacaaaccgttcgccgtggttgcccggcacgagtatcacccgcgttaatcctgacgcccgtttgatctccagttccagcgatagcgagcgtttccagctttcttccgacatcggcgtcacaatgccggtagtgccaataatggaaatgccgccaagaatgccaagccgcgagttatacgttttttgcgcccgcgcttcgccttccggggcaaaaatctccacatcggccccacgcgccgggcctatcgcttcgcgcaccgctgactcaatggtatggcgcggcgtacgattgatggcggcgctcccgagcggcagtccaatccctttacgcgttaccgtaccaataccttcgccgccagtgagcgtaatctcaccgctgtcgttgagcgtaacgcgggcaaaaatcagcattccgtgcgtggcatccacgtcatcgccgccatctttacgaattgcggctatcgcctgctggccttcaatgtgcggcgactccacgttcaggcatagcgtgacgcccgacggcgtgacgatggagacctgatgaatcagatgttgacgtaataccatcagcgcggcgacttttgccgccgccgtcgcgcaggaaccggtggtatatcctttacgtaacgctttaccgtggtgccagaccggcgcgtcaaaagaaagctcgctcatcaggcctcccggaggtgatagagcaacgcattgacgatagcggcagccacgttactgccgcctttacgccctaacgcggcaaccgcggggaaatggctatgggtgagtgcctctttggactccgccgcgccgacaaagcctaccggtacgcccaccacgccgctcaccgtcacgttatgttcaagcaaacggaacagggccgtcggcgcattaccgaaaacaaagagcttgtttttctcctcctcggcgatagcgatatcgacggcggccattgaacgggtaatcccctgcgtttgtgcggcgcgcaccacgcgcggatcgctgatataacagcgacactcgccgccaaacgtcgccagtaatcttttattaatgccggacagcgccatcgtggtatcggtataaataatgcacggatggcgtaacgcatcacaaagctgctccagcgcatcggcagagaaccacaaaatgtccagccagtcgaaatcggcggtggtatgaataacccgcttgataatggcctcatggagcggactggcgaaacggtaatcaggacgcgtttcgcgaataatgtcgctaataatggtgaaactgttggcctcaatggtttggggctgctggatataatgcatactgtcgtcctcaggccacgccagataacccgcaccgcgccgcaattaacagcgccagcgccagggttgaagcgacccacatcaatcgaatcgttcgggaaatatcgtccacggaaatatcgcgctgcgcgtcgcctatccagggcttgtccacacgctcgccaaagtagttatttgggccaccgagctggattcctaaggcgccggccacacacgcttccgaccaggcgcaatttgggctactgtggttataacggtcacgccagccaatacgcagcgcccgccaaccactcaggcgacacagtcctgccgcaatgcccagcaacagccagctcagtcgggcaggaagatagttcgctacgtcgtccatacgggcgctgaccataccaatcgcccggtatttttcatgtttgtagcccaccattgaatccagggtattgacggctttgtaggccatcgccagcggcgcgccgccgagaaagaggaaaaagagcggcgcgataatgccgtcaacggtgttttctgcaaccgtttccaccacggcgcgattgatctgcgctggctgaagttgcgacgtatcgcgcccgacgatccaggagagttttattcggctttccgcaaggtcgttcttccgtaacggtcgttcaacctcctgcgcggcgtgggccagagagcgtccggccagcgtggtaaagatcatccagacttcgacgctccagccaaaccaggggtgaatccgctgcgccagcgccagtacgccccatgccacgccccaggtcgccccgacaaccacaacccacattacgccgccgccaatccgcagcgctttatcgccgggacaatagcgacgcacaatacgctgcacaaacgtgattaaacgacctatccagcgtaccggatggggccagtgttgagggtcgccgatgataaaatccagcacccaggcgatacaccaggcaagaatcgtcataatacgcgcctcgccgccgccagccagtgctgcaacatttccggacgctgggcgaaatggacgtgcagatagctggcaaacgtgttgcctgtctgccagccgccagtccattcctgtaacacgcggccatcgcgaaccttacgacaggccataacggcgggtgtttcggggataaaatctgagtagtgaaattcatggccgcgcactatctcgccaggcgccgccaatagcgttggctgcatagcctgcgcctcacaataaccaaagcgggtgagtcgcttacccattttgctgtgaccggggataatattcgccatctgatgaatttccccgccgctatcctccagagtgctccccagatacatcagaccaccacactccgcgtaaatcgccacgccgcgctgatgcgccgcccgcaaatgttttaacatcaccgtatttgccgccagatccgcggcgtataattcaggatatccaccgcccagccagatcatctgacaatcaggcaatgcgcggtcatgcagtgggctaaaacgcacaatgttaacgccggcacgctccagcaaatcgatgttatcgggataataaaagttaaaggcctcatcatccgccagagcaagcgtcagccctgcccccgctgtgttatcggggcgttcaggccacattcccgccggaagcgcggataacacgctcagcgagagtagcgcatccacatccactgtttgttccagcgtggcggcaaaatcatgccatgattgctgattgacgagggattctctggcagtaatcaaccccaggtggcgttcaggtaatgcgacgccgtcgcaaggagggacataccccagtaccggcagtgagcaataatgttcaatggcatttttgaggagctgatagtgggcgtcgctagtgacgcgattcacaatcacgcccgcgaggttgagggtcgggtcgaagtgctgaaatcccataacggtagccgcaagcgacgttgaaacagccttgccgtccaccagtaggatgaccgggcaaccaagctgtttggccatcgcggctgtgctgcagtaattggggtcgacgccatagccgtcatacaaccccatgaccccttcaatgacagcgatatccgcctgccgcatttgttcgcaaaataaggcgttgagaacaggaggaggaagcatgaaactgtcaagattacgggacgccacgccacagatagcggtatgccagccggtatcaaggtaatctggcccaactttaaacggctgtacgcgcagcgcgcgtttttgcagcagcctcaacaaaccaagcgtcaccgtggttttgccgcaaccgcttcctgtgcctgcaagaataaatgcgtgatgccttgccgccattaccctgatcctgttcagggtggtaggggtatacaggtacgcgcatgttcagtctttcgactgtacgcgtcttcgcaacccacttcccaccgaagttgttggttatcaccgacaggcaggtcttctggcttagcgtcctcctcgcccgtccttcccaatcttgcgatcagtggtctttacggggtcgtcagcatcacagcagcgggggctgcgggggattttcacccccttccctaccacaaatgtggcaaacctgttggtttacgttatggctgtacggcacacccataacgacaattaataatgtgctacgttttacatttctgtgagcaatagcctgagcggttgctcatctgacgttaatctactcatccttaccggtatattgacgataaaacgtatcgacaaagcgtaataaaacttatctttcctgacactgtacttcatcacaaaaataaaaactggtgcagtttatgccctaaattttattattttgttgcgctatgacaatttattgttacaccagataaattttctttctgaaatgattaagatacaaaagactatcaaaaatcggcaatagcaaaatattgctattcataacgatggaggatgagaattctcatttatctgctggcgataagcctgcggcgtaacctgataggtctggcggaagactttgcaaaaatagctggtttgcgaaaagcctaaattacgcgcaatactggcaatactccagtcactatggcaaagcaattctctggcgctaaccattctctggcggtttacccacgcattaaatccgattccctgatatttcttgaatagcttactgaagtaataggggctgagatagacatgtgaggcgacatcctcaagacgaagatcgtcggacaaatgcgcatcaatatagcgaagcgcttttttcattttactgtcatgcggagtgggaccacgagtggttttatttgcctccgattgctgcggattgtctttgataaccacgaaattgagctgttttttcaggcaattctcaacaatcagtttaagaagatcggcggaagcgataacgcgtgaatagtccatctctggcacattccgaaattcattcaagagctcagggtcagcctgccagcgatcgtcaacattaagaatgtttaccagctccacgtcattacttaaacgaacctgcccgcataaaacaaagccaactaaatgccctgcgattaccagcggaatagaaaaatccgttagaccggcatgacaacgataaatacagggttgatcggacttcgatgcctccagtcccccgcagcgatcgctcatacgacaacgtgtactatgctggggatgctgccgcatcaactgacaaaacggcgtgaaattgaatagctcagatatttcatcaccatgaatattgacaaccacaaccgccagaccggtggcttgtgcaaaatcctgtgcgattttattaatgagttctgagttcagagcgctcgcagaaatcatgataaaacccctcagttaatttattgttataaacaaaacacattatttacattcactttttattaccattatcctggccctgataaaaagtacaatgacaatatcaaaagtctcccattgctgggagacgttttgatcagttcgtgaaagcagatcacgaaattatctcacctgtttttacgatacatcattgctgtgaatctggttcgcatttccttacagttcacagcggttacaaggtaaattcttaccaataaaatagcgatatatggctgctccggcacaggcgccgataacaggcgcgacaatcggcacgataaaataagggatctctcgcccaccgctcatcgccatgttcccccaccccgctaaccatgtgaacagtttgggaccgaaatcacgcgccgggttcattgcaaaaccggtaaggggtccagtagacgcgccgataacggcaaccagtatcccaataagcaaaggcgcaagcggccctttaggaatgccattgccatcatccgtcaatgccatgatcatgcccatcagaatcgacgtaatgaccacttccaccaacgcagcctgccatacatttagcgctgcggccggataggtactgaaaatgctggctaattgcaaactttcgacgctaccgcgcaccatatgatgcgcagtctcaaattcagtaaaaaggctactataaagcacatacgccagcagagcgccgccaaaagcgccggcaaactgggcaataatataaggcaatactttctgtttggggaagcaggcaaacagccacagcgcaatcgtcaccgcagggttaagatgtccgccggagattccggcagtaaggtaaacggccagtgaaattccaagcccccaaataatgcaaatctcccataatccgaggctggcgcctgcgactttgagcgcgctcaaacaaccgataccaaaaaacaaaaagagtccggtgcctaaaaattccgcaccacattgcgcctttagagaatcattcatgtgacaccttctgagcaaagttcgtgtcctggccagcgcaagtttcggctggcggtagagtacagctaacctcactataaaaagtgccgcctgtaaattgttggcaacctgcgaacctgtctcccggaaaaatcgtgttgcgatagcaaaattttgcttttccgatatttttagcagcccatcatacgggagattcgagctataaaatacgcctgtgaaaataataaaatattgcacaagccaacttatcaatttcgaataagcatcacattttgcgtctttcgccatatcaaataaaaatactctcgtcactaacaaaaatgtaaaaaatgaaataataaaaacaaaataatcatatagacaataataaattaaatgtaatttatcaataagttataaaagcaaaagacaatttagtcatattgctttcccattattttctgatgctcaacagcaagtcagccattctttttcctcgcatcttcttatagtcccaactatcggaacactccatgcgaggtctttatgcaacaagaagcactaggaatggtagaaaccaaaggcttaaccgcagccatagaggccgctgatgcaatggttaagtcagccaatgtgatgttagtgggctatgaaaagattggctccgggctggtaaccgtcatcgtgcgcggcgatgttggcgcggtcaaagcggccaccgatgcaggtgccgcagccgcacgcaacgtgggtgaagtgaaagccgtacacgtcatcccacgccctcacaccgatgtagaaaaaatcttaccgaagggaattagccaatgagcagcaatgagctggtggaacagatcatggcgcaggtgattgcccgtgtggcaacgccggaacaacaggccatccctggtcaaccccaacctatacgagagacggctatggcagaaaaaagctgcagtttaacggaatttgtcgggaccgccattggcgataccctgggcctggttatcgccaacgtcgataccgccctgctggacgcgatgaaacttgagaagcgctatcgttccatcggcattctcggcgcccgcaccggcgcaggcccgcacattatggcggcggacgaagcggtgaaagccaccaacaccgaagtggtcagcattgagctgccgcgcgataccaaaggcggcgcgggccacggttcgctgattattttaggcggtaacgacgtttccgacgtcaagcgcggtatcgaagtcgcgctgaaagagctggaccgcaccttcggtgatgtttacggcaacgaagccggacatatcgagctgcagtacaccgctcgcgccagctatgcgctggaaaaagcgttcggcgcgccgattggccgcgcctgcggcattatcgtcggcgctccggcttccgtcggcgtactgatggccgataccgcgctgaagtcagccaacgttgaagtcgtggcgtacagctctccggcgcacggcaccagctttagtaacgaagctattctggtgatttccggcgactccggcgcggtccgtcaggcggtgacctccgcccgcgaaatcggcaaaaccgtccttgcgaccctcggttctgaaccgaaaaacgatcgtccgtcctacatctgatacccacgaggctgattcatgagatcgaaaagatttgaagcactggcgaaacgccctgtgaatcaggacggctttgttaaggagtggatcgaagaaggctttatcgcgatggaaagcccgaacgacccaaaaccgtcgataaaaatcgttaacggcgcggtaaccgagctggacggaaaaccggttagcgaattcgacctgatcgaccactttatcgcccgctacggcatcaacctgaaccgcgccgaagaagtgatggcgatggattcggtcaagctggctaacatgctgtgcgatccgaacgtcaagcgcagcgaaatcgttccgctaaccaccgcgatgaccccagcgaaaattgtcgaagtggtttcgcatatgaacgtggttgagatgatgatggcgatgcagaaaatgcgcgcccgccgtactccatctcaacaggcgcacgtcaccaacgttaaagacaacccggtgcaaattgccgccgatgccgccgaaggcgcatggcgcgggtttgacgaacaagagacgacggttgcggtagcgcgctatgcgccgttcaacgccatcgcgctgctggttggttctcaggtaggtcgtccgggggtactgactcaatgctcgctggaagaagccaccgagctgaagctcggcatgctgggccacacctgctacgccgaaaccatctccgtttacggcaccgagccggtcttcaccgacggtgacgataccccatggtcgaagggcttcttagcctcttcctacgcctctcgcggcctgaaaatgcgcttcacctccggctccggctccgaagtgcagatgggctacgccgaaggcaaatccatgctgtatctggaagcgcgctgcatctatatcaccaaagccgcgggcgttcaggggctgcaaaacggctccgtaagctgcatcggcgtaccgtctgccgtgccgtcaggcattcgtgccgtgctggcggaaaacctgatctgctcttcgctggatctggaatgcgcctccagtaacgaccagaccttcacccactccgatatgcgtcgtaccgctcgcctgctgatgcagttcctgccgggtaccgactttatctcctccggttattccgcggtgccgaactacgacaacatgttcgccggttccaacgaagatgcggaagactttgacgactacaacgttatccagcgtgacctgaaagtggacggcggtctgcgcccggttcgcgaagaggacgttatcgccatccgtaacaaagccgcccgcgcgctgcaggccgtgtttgccggaatgggactgccgccgattaccgatgaagaagttgaagccgcgacctatgcccacggttcgaaagatatgccggagcgcaacatcgtcgaagacatcaagttcgcccaggaaatcatcaataaaaaccgcaacggtctggaagttgtgaaagcgctggctcagggcgggtttaccgacgtggcccaggacatgctcaacatccagaaagccaagctaaccggcgactatttgcacacctccgccattatcgtcggcgacggacaagtgctctctgcggttaatgacgtcaatgactatgccggtccggcaacaggttatcgcctgcagggagaacgctgggaagagattaaaaacatccctggcgctcttgatcccaacgagattgattaaggggtgagaaatggaaattaatgaaaaattgctgcgccagataattgaagacgtactccgcgatatgaagggcagcgataaacccgtctcgtttaatgcgcctgcggcatccacagcaccacagaccgctgcgcctgcgggcgacggctttctgaccgaagtgggcgaagcgcgccagggcactcagcaggacgaagtcattatcgccgtcggcccggcatttggcctggcgcaaaccgtcaatatcgtcggcttaccgcataagagcattctgcgcgaagtcattgccggtattgaagaagaaggcatcaaggcgcgcgtgattcgctgctttaaatcttccgacgtggcgttcgtcgccgttgaaggtaaccgcctgagcggatccggcatctccatcggcatccagtcgaaaggtactacggttatccaccagcaggggctaccgccgctctccaacctggagctgttcccgcaggcaccgctgctgacgctggaaacctaccgtcagattggtaaaaacgccgcccgctatgcgaaacgagaatcaccgcagccggtccctacgctcaatgaccagatggcacgcccgaagtaccaggcaaagtcggccattttgcatattaaagagaccaagtacgtcgtgacgggcaaaaacccgcaggaactgcgcgtggcgctttgataaaggataactccatgaataccgacgcaattgaatcgatggtccgggacgtattgagccgcatgaacagcctgcagggcgatgcgccagcagcggctcctgcggcaggcggcacgtcccgcagcgcaaaggtcagcgactacccgctggcgaacaaacacccggaatgggtgaaaaccgccaccaataaaacgctggacgactttacgctggaaaacgtgctgagcaataaagtcaccgctcaggatatgcgtattaccccggaaaccctgcgcttacaggcctctatcgccaaagatgcgggtcgcgaccggctggcgatgaacttcgaacgcgccgccgaactgaccgcggtaccggacgatcgcattcttgaaatctacaacgcccttcgtccgtatcgttcaacgaaagaagagctgctcgctatcgccgacgatctcgaaaaccgttatcaggcaaagatttgcgcagctttcgttcgtgaagcggcagggctgtacgttgagcgtaaaaaactcaaaggcgacgattaaggatttcgtatgcgatatatagctggcattgacatcggtaactcatcaacggaagtcgcactggcgcggcaagatgagactggcgcactgacgattacacacagcgcgctggcggaaaccaccgggatcaaaggcacgttgcgtaacgtgttcggcattcaggaagcgctcgccctcgtcgcaaagcgcgcggggatcaatgtcagagatatttcgctcatccgcattaacgaagccacgccggtgattggcgatgtggcgatggaaaccattaccgaaaccatcatcaccgaatcgacaatgatcggccataacccaaaaacgccgggcggagcaggccttggtgtgggtatcacgattacgccggaggagctgttaacccgcccggcggactcgtcctatattctggtggtatcgtcagcctttgattttgctgatatcgccaatgttatcaacgcctcaatgcgcgccggataccagattaccggcgtcattttgcagcgcgacgatggcgtactggtcagcaaccggctggaaaaatcgctaccgattgtcgatgaagttctgtacatcgaccgcattccgctggggatgctggcggcgattgaagtcgccgtgccgggaaaggttatcgaaaccctctctaacccttacggcatcgccaccgtatttaatctcaacgccgatgagacaaaaaacatcgtcccgatggcgcgcgcgctgattggcaaccgttccgccgtggtggttaaaacgccatccggcgacgtcaaagcgcgcgcaatacccgccggtaacctggagctgcaggctcagggtcgtaccgtgcgcgtggatgttgccgccggtgccgaagccatcatgaaagcggtggacggttgcggcaagctcgacaacgtcaccggcgaggccgggaccaatatcggcggcatgctggagcacgtgcgccagaccatggccgaactgaccaacaagccgagcagtgagattttcattcaggatctactggccgttgacacctcggttccggtgagcgtcaccggcggtctggccggggagttctcgctggagcaggccgtcggcatcgcctcgatggtgaaatcagaccgtctgcagatggcgatgattgcccgtgaaattgagcagaagcttaatatcgacgtgcagatcggcggcgctgaggctgaagccgccattctgggcgcgctgaccacgccgggtaccacccgaccgctggcgatcctcgacctcggcgcgggctccaccgatgcctccatcatcaaccctaaaggcgaaatcatcgccacccatctcgccggggcaggcgacatggtcacgatgattattgcccgcgaactggggctggaagaccgctatctggcggaagagatcaaaaaatacccgctggctaaggtcgaaagcctgttccacttacgccacgaggacggcagcgtccagttcttcccgacgccgctgcctcccgccgtgttcgcccgcgtctgcgtggtgaaaccggacgaactggtgccgcttcccggcgacttagcgctggaaaaagtgcgcgccattcgccgcagcgctaaagaacgcgtctttgtcaccaacgccctgcgcgcgctgcgccaggtcagtccaaccggcaacattcgcgatattccgttcgtggtgctggtcggcggctcgtcgctggatttcgaagttccgcagctggtcaccgatgcgctggcgcactaccgcctggtcgccgggcgaggaaatattcgcggcagcgaaggcccaagaaacgcggtggccaccggcctgattctctcctggcataaggagtttgcgcatggacagtaatcacagcgccccggctatcgtcattaccgttatcaacgactgcgccagcctctggcacgaagtgctgctgggcattgaagaggaaggcatccctttcctgcttcagcatcacccggctggagatatcgttgacagcgcctggcaggcggcgcgcagctcgccgctgctggtcggcattgcctgcgatcgacactcgctggtcgtgcattacaagaatttacccgcatcggcgccgctttttacgctgatgcatcatcaggacagtcaggcccaacgcaacaccggtaataacgcggcacggctggtcaaagggatcccctttcgggatctccatgcttaatcacaggagaacggcagtatgaataacgcactgggactggttgaaacaaaagggctggtcggcgccattgaagccgccgatgcaatggttaaatccgccaacgtacagctggtgggctacgaaaaaattggttctggcctggtgaccgtcatggttcgcggcgatgtcggcgcggttaaagcagccgtagatgccggcagcgcagcggcaagcgtcgtgggtgaagtgaaatcctgccacgttatcccgcgtccgcacagcgatgttgaggccattttaccgaaatcagcctaatcgatggcgaataaggagcaccgcgtgaagcaatcactgggattacttgaagtttgtggtctggcactggctatcagctgcgccgatatcatggcgaaatccgcttctatcacgctgctcgccctcgaaaagaccaatggttcaggctggatggtgattaaaattaccggtgatgtggcctccgttcaggcggctatcaccaccggtgcgcatttcgccgaacagcggaatggcctggtggcccacaaggttatcgccaggcccggagaagggatcctgctcgcagagacaccctccccctccgtcattgaacctgagcctgaagcgtcagagatagctgatgtcgtttctgaagcgccagccgaagaggccccgcaggaatcagaactggtcagctgcaatctgtgtctggatccaaaatgtccgcgccagaagggcgaacctcgtacgctttgcattcattccggcaagcgaggtgaagcgtaatggataaagagcttctgcaatcaacggtccgtaaagttctcgacgagatgcgccagcggcctattccgctgggcgtctcaaaccgtcatatccacctgtccgcacaggattatgagcggctgtttcccggccatcccatcagcgagaaaaaagcgctgctgcagccgggacaatacgccgcggagcaaaccgtcactctggtgggaccgaaagggcagctcaaaaatgtgcgcctgctcggcccgctgcgctcggtaagccaggtggaaatttcgcgtaccgatgcgagaacgctggggattgccgcgccgctgagaatgtccggcaacctgaaggggacgccgggcatccgcctggtcagcccctttgccgaactggagctgccttccggggttatcgtcgcgcagcggcatatccatatgtcgccgcttgatgcgctgatcctgcgggtttcccacggcgatatggtctccgtggcgattgaaggcgacgatcgcgggctgattttcaacaacgtggcgattcgcgtttcaccggacatgcgcctcgaaatgcacattgataccgatgaagccaacgccgctggtgccgataacccgcatgcctttgcccggctggtaggcccgcgatgaacggcgaaaccctgcagcgcattgtcgaggagattgtctcccggctgcatcgccgtgcccagagcacggcgacgctgagcgttacgcaacttcgcgatgccgactgtccagcactgttctgtcagcacgcgtcgctgcgcatcctgctcatcgacctgccgctgctgggtcagcttgcggatgcagaaaccggcgatgccgccgcccggaaaattcacgacgcgctggcgtttggcatccgcgtacagctcagcctgcacagccagctgctgccggttatcccggtaaaaaaactggctcgtctgccgctggtattcaccgatgagcacggactgccgctggttctgcatgcgggttcggtgctgagctatcgcgatgtcgcgctgctaagccgggggcgtgtggttgtccaccgcaaatgcatcgtgaccgccatggcgcgtgacgcggccaatgcgcggaatattcaattaattaagcaggagtaaatcatgcatctggcacgagtcacgggcgcggttgtctccacgcaaaaatcaccttctttgattgggaaaaagctgctgctggtgcgtcgggtcagcgccgatggcgaactccccgcctcgcccacctccggcgatgaagtggccgtggactccgtcggcgcgggcgtcggcgaactggttttgctcagcggcggctccagcgccaggcacgttttttccgggccaaatgaggccattgacctcgccgttgtcggcattgtagatacgctttcgtgttaaggggcggttatggcgatttatacccgaacaggtgacgctggcaccacatcactgtttaccggccagcgggtgagcaaaacccacccgcgggttgaagcctacggcacgctggatgagctgaacgccgcgctgagcctgtgcgcctgcgccgctgcggatgaaaaccaccgcaccttactcgaggccatccagcagcaacttttttggtttagcgcagagctggccagcgacagcgagcagccatcgcccaaacagcgctacatcagcagcgaagagatttcggccctggaagccgctatcgatcgggcgatggcccgcgtcgaaccgctgcacagctttattttacccggacgctgcgaagccgcgagccgcttacattttgcccgcacgctggcgcgccgcgccgaacgccgtctggttgaactggcaactgaagtcaacgtacgtcaggtgctgatgcgctatatcaaccgcttatcggactgcctgtacgccctggcccgcgcggaagatagcgatgcgcaccaggccaacatcatccgtgaagttagcaagcgctatctggctgcctgccagccgccccacagcaaggagacgacgccagtggccctctcattccacgatctgcaccagctcacccgcgccgccgttgaacgcgcgcagcaactgcaggttccggtagtcgtcagcatcgttgacgcgcacggcacggaaactgtgacctggcggatgccggacgccctgctggtcagcagcgagctggcgccgaaaaaggcctggaccgcagtggcgatgaaaacggcgacccatgagctgagcgatgtcgttcagccgggcgccgcgctttacggtctggaaagtcatttacagggaaaagtggtcacctttggcggcggttacgccctgtggcgcgacggcatattaattgggggtcttggcatcagcggcggcagcgttgagcaggacatggacatagcacagaccgccatcgcggctattaacgtgggaactcatcaatgaatacttctgaactcgaaaccctgattcgcaccattcttagcgagcaattaaccacgccggcgcaaacgccggtccagcctcagggcaaagggattttccagtccgtgagcgaggccatcgacgccgcgcaccaggcgttcttacgttatcagcagtgcccgctaaaaacccgcagcgccattatcagcgcgatgcgtcaggagctgacgccgctgctggcgcccctggcggaagagagcgccaatgaaacggggatgggcaacaaagaagataaatttctcaaaaacaaggctgcgctggacaacacgccgggcgtagaagatctcaccaccaccgcgctgaccggcgacggcggcatggtgctgtttgaatactcaccgtttggcgttatcggttcggtcgccccaagcaccaacccgacggaaaccatcatcaacaacagtatcagcatgctggcggcgggcaacagtatctactttagcccgcatccgggagcgaaaaaggtctctctgaagctgattagcctgattgaagagattgccttccgctgctgcggcatccgcaatctggtggtgaccgtggcggaacccaccttcgaagcgacccagcagatgatggcccacccgcgaatcgcagtactggccattaccggcggcccgggcattgtggcaatgggcatgaagagcggtaagaaggtgattggcgctggcgcgggtaacccgccctgcatcgttgatgaaacggcggacctggtgaaagcggcggaagatatcatcaacggcgcgtcattcgattacaacctgccctgcattgccgagaagagcctgatcgtagtggagagtgtcgccgaacgtctggtgcagcaaatgcaaaccttcggcgcgctgctgttaagccctgccgataccgacaaactccgcgccgtctgcctgcctgaaggccaggcgaataaaaaactggtcggcaagagcccatcggccatgctggaagccgccgggatcgctgtccctgcaaaagcgccgcgtctgctgattgcgctggttaacgctgacgatccgtgggtcaccagcgaacagttgatgccgatgctgccagtggtaaaagtcagcgatttcgatagcgcgctggcgctggccctgaaggttgaagaggggctgcatcataccgccattatgcactcgcagaacgtgtcacgcctgaacctcgcggcccgcacgctgcaaacctcgatattcgtcaaaaacggcccctcttatgccgggatcggcgtcggcggcgaaggctttaccaccttcactatcgccacaccaaccggtgaagggaccacgtcagcgcgtacttttgcccgttcccggcgctgcgtactgaccaacggcttttctattcgctaactgaggtcgcgatgaataccttctcactacaaacgcggttgtacagcggtcagggcagcctggcggtgctcaagcgctttaccaataagcacatctggataatctgcgatggctttctggcgcactctccgctgctggataccctgcgtaacgcgctgcccgcagataaccgcatcagcgtctttagcgagataacgccggaccccaccatccacacagtggttcagggcattgcgcaaatgcaggctctgcaaccgcaggtggtgatcggttttggcggcggctcggcaatggacgcggcgaaagcgattgtctggtttagccagcagagcgggatcaacatcgaaacctgcgtggcgatcccgaccaccagcggcaccggctcggaagtgaccagcgcctgcgtaattagcgacccggataaaggcatcaagtatccgctgttcaacaatgcgctgtatccggatatggcgatcctcgacccggagctggtggtcagcgtaccgccgcagattaccgccaacaccggcatggacgtgctgacccacgccctggaggcctgggtgtcaccgcgcgccagcgactttaccgacgcgctagcggaaaaagccgccaaactggtgttccagtatctgcccacggcggtggaaaaaggcgactgcgtggcgacgcgcgggaaaatgcacaatgcctcaacgctcgccgggatggccttcagccaggcggggctggggcttaaccacgcgatagcccaccagcttggcgggcagtttcatctgccgcatggcctggccaacgccctgctgttaaccacggttatccgttttaacgccggcgttccgcgcgccgccaaacgctacgcgcggctggccaaagcctgcggtttttgcccggcagaagccaatgatatcgcggcgatcaatgcgctgattcagcaaatcgaactgcttaagcaacgctgtgtccttccctcactggccgttgcgcttaaagaaggaagatccgacttttccgcacgcattccggcgatggtgcaggctgcgctggctgacgttacgctgcgcactaacccgcgcccggccaatgccgaagccattcgggaactgctggaggaactgctatgagcaccgccatcaacagcgttgaaatgtcccttagcgccgatgaaattcgcgagcgcgttcgcgcagcgggcgttgtcggcgcgggcggcgcaggttttcccgctcacgtcaaactacaggcgcaggtagagatttttctggtgaacgccgccgaatgtgaaccgatgctcaaagttgaccagcaactgatgtggcagcaagctgcgcgccttgtgcgcggcgtacagtacgccatgacggcaaccggcgcgcgcgaaggggtgatagccctgaaagaaaaataccgccgggccatcgacgccctcaccccactgctgccagacggtatccgcctgcatatcctgccggatgtatatccggcaggcgatgaggtgctgactatctggatggcaaccggtcgtcgggtcgccccggctgcgctaccggccagcgtcggcgtggtcgtcaataacgtgcaaacggtgctaaatattgcccgagcggtcgagcagcggtttccggtcactcgtcgcacgttgaccgtgaacggcgcggtcgccagaccgttgaccgttactgttcccatcggcatgtcgctgcgggaagtactggcgctggcgggcggcgcaacggtcgacgaccctggttttattaacggcggcccgatgatgggtggcctgattacctctcttgataatccggtgacgaaaactaccggcggcctgctggtgctccccaaaagccatccgcttatccagcggagaatgcaggacgagcgcacggtgctttccgtcgcgcgcaccgtctgcgaacagtgccgactgtgtaccgatctctgtccgcgacacctgatcggccacgaactctctccgcacctgctggtgcgggcggtgaactttcatcaggctgccacgccgcagctgctgctgagcgcccttacctgttcggaatgcaacgtttgcgaaagcgtggcctgtccggtggggatctcgccgatgcgcatcaaccgcatgttaaaacgcgagctacgggcgcaaaaccagcgctacgaagggccgctgaatccggccgacgagatggcgaaatatcgcctcgtgccggtgaagcggctgatcgccaaactgggactaagcccctggtaccaggaagcgccgctggttgaagaagaaccgtcagtagaaaaagtcactttgcagctgcgccagcatattggtgccagcgcggtagcgaacgttgcggtgggagaacgcgtgacgcgcgggcaatgcgttgctgatgtcccgcctggcgcgctcggcgcacccattcacgccagcatcgacggcgttgtatcggccatcagcgaacaggccatcactgttgtaagaggttaaccatgtctcaggctataggaattttagaactcaccagcatcgccaaaggcatggagcttggtgatgccatgctgaaaagcgccaacgtcgatctactggtcagcaagaccatctgtccggggaagtttttactgatgctgggcggcgatatcggcgctatccagcaggccattgaaaccggtacgtcgcaggccggcgagatgctcgtcgacagcctggtgctggcgaatattcatcccagcgtacttccggccatcagcagcctgaacagcgtcgataagcgccaggcggtaggtatcgtcgaaacctggagcgtggcggcctgcattagcgccgcagaccgggcggtgaaaggctcaaacgtcaccctggtgcgggtgcatatggccttcggtatcggcggtaaatgctacatggtggtggcgggcgacgtttctgacgtcaataacgccgtgacggttgccagcgaaagcgcgggcgagaaagggttgttggtttaccgttcggtgatcccacgcccgcatgaagccatgtggcgacagatggtggaggggtaatggaaagacaaccgacaacggatcgcatgattcaggaatacgtgccggggaaacaggtcactctcgcgcacctgattgctaatccagggaaagatctctttaagaagctgggcctgcaggatgcagtgtccgccattggcatccttaccatcacgccgagcgaagcatcgattatcgcctgcgatatcgccaccaaatccggcgcggtggaaattggttttctcgatcgctttaccggtgccgtggtgctgaccggcgacgtttctgccgtcgagtatgccctcaagcaggtaacgcgcacgctgggcgaaatgatgcagttcaccacttgctcgatcacccggacgtaaagtcatgaagcgtttgatgtttatcggccccagccagtgcggaaaaacctcgctgacccaaagcctgcgcggcgaagcgctccattataagaaaactcaggccattgaatggtcgccgatggccatcgatacgccgggcgaatatctggagaaccgctgcctgtacagcgccctgctgaccagcgcctgcgaggccgacgtcatcgccctggtgctgaatgccgacgcccagtggtcgcccttttctccgggttttaccgccccgatgaaccgcccgacgattggcctggtcaccaaggccgatctcgccgagccgcagcgtatttcgctggttgcggagtggcttacgcaggctggcgcacagcagatttttattaccagcgcgctgaataactcgggtctcgacgccgtgctggattttctgaattcgaaggaacctttatgtcttacaaaataatggccattaacgccggtagctcatcgttaaaatttcagctgctggagatgccgcagggcgacatgctctgtcaggggctgattgagcgtatcggtatggcagatgcgcaggtgacaattaagacgcacagccaaaaatggcaggaaaccgtccccgttgccgatcatcgcgatgcggtaacgctgcttctggaaaagctgctgggttatcaaatcattaacagtctgcgggacattgatggggtgggccatcgtgtggcgcacggcggtgagttttttaaagactcgacgctggtcacggatgaaacgttagcgcaaatcgaacgtcttgctgaactggccccgcttcacaacccggtaaacgcgttgggtattcacgtttttcgtcaactgttgcctgatgccccttccgtagccgtgtttgatacggcatttcaccagacgctggatgaacccgcctatatttacccgcttccctggcattattacgctgaactggggattcgccgttatggctttcatggcaccagccataagtatgtcagcggcgttctggcggaaaagctgggcgtaccactcagcgcattacgggtgatttgttgtcatcttggaaacggtagcagcatctgcgccatcaagaacgggcgttcggtcaatacgtcgatgggctttacgccgcagtcaggcgtgatgatgggcacccgtagcggagatattgatccctctattctgccgtggatagcccagcgcgaaagcaaaacgccgcaacagttgaatcagttattaaataatgagtcaggcttgctgggcgtttctggcgtgtcgtctgattaccgcgatgtcgaacaggcagccaataccggtaaccggcaggctaaactcgctctcactctgtttgccgaacgcattcgcgccaccattggcagctatattatgcaaatgggaggactggatgcgctggtattcactgggggcattggcgagaactcagcgcgcgccagatcggcggtgtgccataatttgcaatttttgggcttagccgttgatgaagagaaaaatcagcgtaatgcgacatttatccagacggagaacgccctggtgaaagtcgccgtcatcaacaccaacgaagagttaatgatcgcacaagacgttatgcgcattgcgctaccggccacggaagggctttgtgtaccagcctgagagggttatacgacgcattgcggcaagtcatggtaataacgcttttaccatgacactatgcgcgcacactattcgtacctgaaaggtgataatgtggctgttgcgcaatgccccgcctcatgcggggaacttatccagggatggattctgggcagtgagaaactggtctcctgccccgttgactggtacagcaccgtagcagtcacggctgcgccgccgttgataaacgagcgcccattgtcgcgggcgatggtggagcgcgttctggcgcactggcagtatcctgcgcactggagtaacgagattcgcgtcgatgtgcgttcgtcaattcccgttgccaaaggcatggccagcagcaccgcagatattgccgctacggcggtggcaacggcgcatcatcttggccattcgctggatgaaaccacccttgcacagctttgcgtctcaatcgaacccactgatagcaccgtttttcatcagttaacgctgtttgatcataataatgcggccacgcaaatcgcctgcgagccaccgccgccaatcgatttgctggtactggaaagcccggtcacactgcgcacgcaagattaccaccgtctccctcgccagcagaaattaatagcaagttcagcaaccttgcagcaggcctggaatctggtgcaggaagcctgtataacgcaaaatccgctccggctgggtgaggcggctacgcttagcgctatcgccagccagacgctgttacctaagccgggctttaccgccctgctgtcgctggtcgaagagtgtgatttatacggattgaacgtggcgcatagcggtagcgtggtgggtctgatgctggaccggaaacgtcatgatattgcgcgtctgaaaggtaagctggcagagaaaaaacttacccgacactggccaaaacaacatttactcaagatggtcactggcggggtcaaactgcagtgagagcctgatatacgctcccactgccgtagcgcattattcggcttttacatcggcgtgtttcatttcgcccatcgctttcagctttttggaaatgtcgcgacgctctttggagatttcggcatttttaatgatgtagtcatcaacgcgatcttcatagtcgcttttcatactggcgatgataccctgaatcgcctcaacgctcatacctggcttgatgtagtcgctcaggttgtccagcagcagcacacgcttctggttgtcacggatcttcttctcaatgtcctgaatttcacgctgcagtttatttttgcgacggaacagacgaacaaactccagcacgtcctggaaagaaggcttggttgtttccatttttacacccctgataatgtgagattcggattcgttaagcaactgctagtggataaacattacgtttatccccgtcatacttcaagccgccagaggaaacaccgttacgtcgccgtctggggaaacctgaaggttcggggataaaatcgttgccagtagcactcattttatccttatattagtatcatactcttaatctttgctgaatcgaagcagcaacaaattcattcgccccatctgctttttatttgcgcaaagcccggcagatcaaatgtgaaagcagttccaactgtcgggcagtttccatacttagccaaacatagccgtggataggggtttcagccaccgcgtcgccctgctgctcgttcattagctgccgcaactcggcagcaatatcattcagtttaccggtgtttgccagtaccggctgcgggttgccttcaaacaacgcgtgggcgatcgttagcaaggtttgctgcgtcatctgctgggtttcacgcaatgtgtgcgcgttaagcatcacaaaatggctggcgcgcgtcgcccagtgggcattgatttgtaattcaagcatacaaaccaggttgcggttgatggtctgaatggcctcgaaaatagatttttgtatccgggtttctttactggcaggcgttatcagcccgcgcattttgacgacatcgttcagcaaccgttgcaaatgtttatccaaccgggggcgctccagcaaattcggcgacagcgctgcctgatacacccgattatacgccgtgacgcaatgcgccagttggatgcgccagtgcaaaaaggcgcgctggggccagatgccggtaaacaacattgccagtagcgaccccaaaatcacatccccgccacgccataatgccgtatccatatcaccagcgggagcgccgacaacaacggcaagcgttatgcctatcagtagcgcctgatacggttttttccctaaggccagccagccgcacaaaaacatcgctatcgcacaccacaccagcatcagcggtaaggaaaagagctccaggcgtagcgccaccagccctaacgccgcgcccagaatcgtaccgcctatgcgctcaaaagcacgaggcactacatttccccagaatgagatgggccccataatcaccactaacgtgattagcggccatgtgccctcgggaatagaaaacagacgaaccagcagaaaggtaagaatgaacgccagggcgatacgtatgccatgcacgatgcgataatgacggtacaaccgtatttcaaaagggcttaatgacttatcggcacgcacgcttgcgctccttacgggaatggcaaaaaatgcattgtacctgctttatagcaaaaatagcgcactggcggacggaacacattatccgtccgctcttttcagccaggaaaccagtcgatcacttccgctgtaccggaatatacatttcaatatcccagtatccatcttccatgccgttattcagataggtttcaaaacagggcgcagaggctatctgataagcgctatcctgctcgaggacatcaaaaaaccgttcccacggcttcgcaaagtcacggtcttccactcgcgcgacagcagtggcatattcgccgccttcaatggcggtcacgattacgccttcgctattgtccggcaggatgaaattctctgccacggacaccacggtatcgcagcggagtttttctgcaggtacgacatctggattgtcgtaatagacggcaatccattcaactggcacgatccgctgtcgatccacccacgtcatcagttgttcaaaaccctgcttcacggtgtgttcccatggaccgaccatgtggaaaccggctatcttgcgtttttgttcctgcctgatttcgtaatccatgctgcctccgtcacttcacaatgctgtatgaatgtacagtataattacagccttttacggtcacaaggacagcgtgatcattttgtgagcaacctcgcaatcccgcccttttgacacctcagatgacggtgaacggtgtgtgtgacaacggcttacgctttatgctgaaaatagtcgctcagacgagagaacataccgcctttacccaccgattccagagtgaccagcggccactgagcgatcagtttatcccgatcgtagagctctatttcacctacctgttgatgagcggcgattggcgcctccagctcttttctatccagcacatattttgctttgatatgcggaatttccgctttaggcagcgccatccagaagtcctgttccgtacccagcgcaatcttttctttgtctccataccagattcgctcgctgcccacttttttaccgctgtgcaaaatctgcaccgtcgcaaagttttgctggccccactgcaacagttttcgcgcctgttcctcacgacctttcgaacttttcgcccccatcacaacggcgataagtcgacgctgcccgtccaccgccgatgcgataagattaaatcccgcccccgatgtgtgtccggttttaagcccatcgatatgcatggtcttatcccataacaagccgttacggttctgctgcgtgatgccgttccaggtcaggcttttctcgctgtacatgtgataaaattcaggctcgccgtgaataatcgcccgggagagtacggccaggtcatacgcggagctatgttgtcccggcgcatccagaccgtggacggtttcaaaatgggtatcctgtaaattgagttttttcacatagctgttcatcatcgccacaaactgcggctgcccgcccgcgatataatccgccagcgccacacaggcatcgttaccggaatccacgattaagccacggcttaaatcacgcaccgacacgcgatccccttcttttaaaaacatcaacgaggagccgacaaacaccggattatccttcgcccaggcgtcgcgcccaactgtgacgatatcgtcagggctgatacgatgactatcgatggcgcgatcgacgacgtagcccgtcattagcttggtaaggctggcgggattacgttgctggtgttcattaccggcggtaagaacctgtcccgtagtgtaatccatcaacacccaggcgcctgcatcaatggctggcggttggggagcaaaacttacggcatcggccgcaagcgcaggagaaaggtgcatcgcgaataaagaagcggcaataaacaaacggcgtttcaacagcatgtcctcaggatggtctctatttgccgttctttttacggaagttcagttaaacaaacatggataaattgcaagaaaatgtgacacaaggcacattttcttgctgacattattttatggatacgctcagacggcggacttatccccgcgcggcgcggtacgatgacgatgatagccgtcaaccatgctacggaaaatttgtcccggcgtgtcgccaagagtacacagatagagatgcgcgcaaataaacagtaagccgatgatagcaagcgccatatgcagcaccagcatcacagggcccagacccgcaacctgcggatagagacacagcaaaccggtgatgattaacagcggtaccagcgcgtacataatcgccagatatgccagttgttgcagtggattgaacttattctgctctgttgccacgaacggatgcgcttcccctttcataatgccaaaaaggtaaaaacgcgtctggcgtatgcagcgcgttaccagtccggaaaaatttacccgatagtgacgcccgttacctgtggtgaggttgatcagcacaaacccgccccagaaagccagtaaggcaaaaccacaccaggtatgcacttgtaccattagcgctacagggccgagagaaaaatgaccaaataaaccgcttaacagtaataaaacaaacagtaacgcatttccccaatgccagcggcgaatcgccagcgagtagagatagtcacgatgttcttcaccgcccgccgtttttggcgccagcatccggcgcaataacgcatggataaccagcccaacaagcatgagcagcaccacgacgcctgcgtaaattaaccacagcggccaataatctggcgcataatgtagttccgctccccagatagtattcatgctttaccctcctgatggacttctttacgacggtacagactgaccgcgccgctacgcgcctcctgctggcgatagacctctttctgaccgacccagcgctggatctcgctctcatccagtctgccgaatttcagcgcgtccgttgggcaaacggatacgcacgccggagactggccagccgccaaccgcgtgtcggcgcagaagttacacttgtcggcgacaccggtttgcggattcaaatagcgcacatggaaaggacacgcggcaacacaataatcgcagccaatacagcgcgatttatccacctgcacgatcccgttttcatcacgatatgacgctccggtaggacaaacgctgacacatggcgcattttcacagtgctgacaggagacgcggacaaattgaaaatgggttagtgcgttggatgcctgttcaggggcgcgaatttgtacctgtacgcggctaaatccctccggtacgtcattaagcactttgcaggcaacggtacacgcctggcagccgatacaacgtttttcatcatgcagcatgacgtactgattcgttaaatgattcatggttccctcctccctcatgcccggctcagcgtcacgcctgcggtatgcactaccgtaccggataccggactcgtcacgtgcggcagtaaatttccgcagtggataccgtgtgtcgtcgccgccgttttggccccagctttagcgccaaatcccatatagacaaaaagcgtgtccgggcggataccgggcgtcaccagcgccttacctttctctttacccgtggcattttccagccagatctcatcgccggtcttaatgcctttttcttgcgccgtttgcggatgaacccagaccgcgttatcccacattagctcgctgagtaaaggtacgtactgcgtcgcgccattggtatgcacggccaccttgccctgaatgaagtaaagctcattctcttttttcagcgcaaagtcacgaacgcgcggaacgccgtagccagggagcaattcctccagggttgcggaataaagttcgattttgccggagggcgatttgaagcgaagctgttcgccataggtgttgtcactgtccgtcgcgatagcgccggggtaacgcgccgtaaactgacgaacggattctggttcgcgtaatagcagcggaacgccccattcgagataccctttctgtcgcagttccttcgctaaggcatggtcgccgttcaactgatagagttggcgcgtctgcatatcctgccacggatagtactgccctaatcccaactgctcgccaagttctttccagatttgccaactcggacgcgcctcgccaatcggctctacgacctgttggcgcagagcgtaagccgggtgcagtcccgacatatcggatacctcttcgtcccgttcgagataggtgcattccggcagcagatagtcggcatatgccgcgctctcgctcaaatagacatcgcagctgaccaccagatccagttgctcaacggtttttaccaggtccgaacgacaggtgacggtctggaaaggattatgccgcgacataatccacgcctttatcgggtaaggcttctgggttaacgccgagtcaataatgctttgcaccacgccgccgccagcggcgatatatttaaactgcggtgcgaccaaatcgatgcgttgcgccgtcggtttcggcatatttttaatgttgagtttcgccagcgttggcgcgaccttttctccggccagtttattgtaaacagacgcgttttttttctgatatagcccgccttcgcgctcaatattaccgagcagcacattaagcgtaaaaatcatacgccgcatatcgatctcttcctgcgagaacgtcgcgcgatgaccaggactgacaatagcgtgaggcgcgcaggcagccagttcgcgtgtcacccggacaataacgtcggctgggacatcggcctgcgcggcggcccattccggcgtcgtctcttttaccgcctgtgctaactgttcaaatccgctggtataacgctcaacaaaagacgcatcgtagagctgttcatcaatcatgacgtggcacatcgccagcagaaccgctaaatcccccccgggacgaatagcgtgccactcatccgccttgctggaaaatatcgacaaacgcggatcgaagctcaccattttggcccccttctcctgcgcggtcattaactcatgggtatcggcaacttcaatcccttcatacaaattgtggccaaacgaaaccagatagcgcgtgttagcgatatccatcgccagatcgccgcccatcatcacttttgccgcaatggctttcccggcagggcatgttgaggcgtgcgtaaaggtattaggcgaaccaaaggccgtagccagatggaaaagatggctggagagcgagcccgatttggaagagaaagccacgctctcggggccatgctgcgctttgatggcattcattttcgccgcgatttcctggtaagcctgttgccagctaatcacctgccattcaccgtcgccgcgtggcccggtgcgtttcataggttttacaatccgttgcgggtcattgaccaggctgacgccgctcccgcccctggcgcatatgcgcgtcccctgctgcggcgcagaaggattgccctggataaaaacggtcttgttattgactacctgcgcctgaatagggcaacgaaaggaacacatttcgcacaagcttggcgttagcgtggttttaccgttaatgccggcaatcgggttgcgcgccagcgccccgggcggaaaagcgcccagcgcgcaggcagagcagccgatgcctaccccctgcaaaaaagaacgacgactaatgctcatataacctcctgttattagatatagctgaagattatatttaatttgtattatgaaatgtcggcttcaatcacaatttgaaatagttgttaaaatgagcatgtcaacacgataaaaccttttattttataaatattttacatttcctgaacacgcacatggactgtcattgaataatcagcagaattaccaaacaacccgctgttaattataaaaatgatacaattccaataacacgtaataatatttaaaagaaaacgattatttcctgaaaagcgatttcacgcgctttacgcagttctttctcatacgcgccggaacgtccgccgacgatatcccgaatgccggcgaaaaacgctggttgagcatcgaagcgggtttacttttgcgtgcacacgggcttcgttacccgacccgctcccttatgccttgatttttccgcagatacgtcagcgtcccacaatacggtgacatgatgacaggatggacactttctgaaagaaacctgccagataacatggtgaattgtgatctccatcgccataccgacatatgaagcttacttttaaggcgttaaaaatccagaccgtttttccataatgatgttgataaggaattctaatgaagatatcatcaggcgcaattaatttttctactattcctaaccaggttaaaaaattaattacctctattcgtgaacatacgaaaaacgggctcacctcaaaaataaccagtgttaaaaacacgcatacatctttaaatgaaaaatttaaaacaggaaaggactcaccgattgagttcgcgttaccacaaaaaataaaagacttctttcagccgaaagataaaaacaccttaaacaaaacattgattactgttaaaaatattaaagatacaaataatgcaggcaagaaaaatatttcagcagaagatgtctcaaaaatgaatgcagcattcatgcgtaagcatattgcaaatcaaacatgtgattataattacagaatgacaggtgcggccccgctccccggtggagtctctgtatcagccaataacaggcccacggtttctgaaggtagaacaccaccagtatccccctccctctcacttcaggctacctcttccccgtcatcacctgccgactgggctaagaaactcacggatgcagttttacgacagaaagccggagaaacccttacggccgcagatcgcgatttttcaaacgcagatttccgtaatattacattcagcaaaatattgccccccagcttcatggagcgagacggcgatattattaaggggttcaacttttcaaattcaaaatttacttattctgatatatctcatttacattttgacgaatgccgattcacttattcgacactgagtgatgtagtctgcagtaatacgaaatttagtaattcagacatgaatgaagtgtttttacagtattcaattactacacaacaacagccctcgtttattgatacaacattaaaaaatacgcttatacgtcacaaagccaacctctctggcgttattttaaatgaaccggataattcatcacctccgtcagtgtcagggggcggaaattttattcgtctaggtgatatctggctgcaaatgccactcctttggactgagaacgctgtggatggatttttaaatcatgagcacaataatggtaaaagtattctgatgaccattgacagcctgcccgataaatacagtcaggaaaaagtccaggcaatggaagacctggttaagtcattgcggggtggccgcttaacagaggcatgtatccggccagttgaaagttcgctggtaagcgtactggcccaccccccctatacgcaaagtgcgcttatcagcgagtggctcgggcctgttcaggaacgtttttttgcccaccagtgccagacctataatgacgttcccctgccggctcctgacacatattatcagcagcgcatactgcctgtgttgctggattcgtttgacaggaacagcgccgccatgaccactcacagcggactctttaatcaggtgattttacactgtatgacaggcgtggactgcactgatggcacccgccagaaagctgcagcgctttatgaacagtatcttgctcacccggcggtgtctccccacatccataatgggctcttcggcaattatgatggcagcccggactggacaacccgcgctgcagataatttcctgctgctttcctcccaagattcagacacggcgatgatgctctccactgacacgctgttaacaatgctaaaccctactcctgacactgcatgggacaacttttacctgctgcgagccggagagaacgtttccaccgcgcaaatctctccggtagagttattccgtcatgactttccggtgtttctcgccgcatttaatcagcaggccacgcagcgacgctttggggagctgattgatatcatcctcagcactgaagagcacggggagctgaaccagcagtttcttgccgccacgaaccagaaacattccaccgtgaagttgattgatgatgcctcagtgtcgcgtctggccaccatttttgaccccttgcttcctgaaggcaaactcagcccggcacactaccagcacatcctcagtgcttatcacctgacggacgccaccccacagaagcaggcggaaaccctgttctgtctcagtaccgcattcgcacgctattcctccagcgccattttcggcactgagcatgactctccgccggccctgagaggctatgcggaggcgctgatgcagaaagcctgggagctgtctccggcgatattcccatccagcgaacagtttaccgagtggtccgaccgttttcacggcctccatggcgcctttacctgtaccagcgttgtggcggatagtatgcaacgtcatgccagaaaatatttcccgagtgttctgtcatccatcctgccactggcctgggcgtagtccagcctcaacccgcatggaattaagggacacagcgttgtgtccctctgtacatagacccgttttagtccatgcattttttgagatcccggccagattgcccctggcctaaattccatacagtactaaatcagaatcagtaatttcagatggaccggaatatggtttaccatagagggagcgtagtttagtgtcgctgatgatcattttagtattttgtactcaccatcgcatgtacgaacattagcaacaatatcaattggtgtacaaatacaatcaatcaacgacaaaataaaagaataaaatatttcatatacatataacatcaggcgtgtacatcaagtgacagttaaaaacgacagcatacagagcacattcctcttccacgattacgaaaccttcggtacgcatccagccctcgacagacctgcgcaattcgccgcgctccgtacggataacgacttcaacgttattggcgagccggaggtgttttattgcaaacccgccgatgattatctaccgcagcccggcgcggtgctgattaccggcatcacgccgcaggaagcgcgtgagaaaggagaaaacgaagccgctttcgccagacgcattcatgcgctgttcaccgttcctaaaacctgcgttgtgggctacaacaatgtgcgctttgatgatgaagtcacgcgcaatattttttatcgcaacttttacgatccctacgcctggagctggcagcatgataattcacgttgggatctattggatgtcatgcgcgcctgttatgcgctgcgcccggagggaattaactggccggaaaacgacgacggcctgcccagctttcgtctggaacatttaacccgggcgaacgggatcgaacacagcaacgcgcatgatgcgatggcggatgtctacgccactattgcgatggcgcaactggtgaaaacacgccagccgcggctgtttgattatctttatagccaccgcagtaaacataaactggcggcgctgattgacgttccgcaaatgaagccgctggtgcatgtctccggcatgtttggcgcgtggcgcggtaatacaagctgggtcgcgccgctggcgtggcatcctgaaaaccgtaacgcggtgatcatggtcgatttagcaggcgatatttctcctcttcttgagctggacagcgatacccttcgcgagcggctttatacggccaaagccgatcttggcgatcacgccgcagtgccggtaaagctggtgcatatcaataaatgtccggtactggcgcaggcgaataccttgcgcccggaggatgccgaccggctgggaattaaccgccagcactgcctggataacctgaaagtgctgcgtgaaaacccgcaggtccgcgacaaagtggtggcgattttcgccgaagccgaaccttttgccgcctcggataacgttgatgcccagctctatgatggttttttcagcgatgccgatcgcgcagccatgaaaatcgtactcgaaaccgagccgcgtaacctgcccgcgctggatattacctttgtcgataagcgcattgagaagctgctgtttaattaccgcgcacgcaattttcccggtacgctggatgacgcagagcagcagcgctggctggagcatcgccgtcaggtgctgacgccggagtttttacaacagtatgccaatgaattgcagatgctttctcagcagtatgcggaagataaaacgaagctggggttgctgaaatcactgtggcagtacgcaaccgagattgtgtaattgaccaatgcctgacgggcattgttaatccagagcggataaatagtgacgccgccatccggtaaacatgctggatgacaaacaaaaaaccggaggcactgcctccggttttactattgccgataatacgcgcgattacgcgacgtcttcgtactgtggaaccgggttgcggaagcttttagttacgcacgccagataaatcagcccgatacccgcccagatcaggcccagtaccattgagctctcttccaggttaacccacaacgcaccaaccgtgagcgcgccgcacatcggcaggaacagatactggaagtgatctttcaacgttttattacgcttctcacggatccagaactgcgaaatcaccgacaggttaacaaaggtaaacgcgaccagcgcaccaaagttaatcagcgctgtcgccatcaccaggtcaaaattaatcgccagcagcgcgatcgccccgaccaggatgatgttcatcgctggcgtacgccatttcggatgaacgtaaccgaagaagcttttcgggaatacgccgtcgcgccccattacgtacatcaggcgcgctacgcctgcatgcgcagccataccggaagccagcacggtgatagtagagaagatcagcgcgcccacctggaaggttttacccgccacgtacagcatgatttccggctgagacgcatccggatctttaaagcgagagatatccgggaagtacaattgcaggaaataggttgcaaagatgaagatcaggccgccaatcagcgcggtcaggaaaatcgcacgcgggatcacgcgctcagcatctttggtctcttccgacaggttactgatgccgtcaaagccggtaaaggagaagcacaggatcgtcgctcccgtaatcatcgggataacgtgcgcatcgccggaccagaacggacgggtgctcgccagcgtaccggcgccttcgccttcaaatacgccataaaccaccatgcccagaatgaccgcaatcagcaccacctgtagcactacaatcacggtgttgaagttagcgaccgatttgaggctgcgcaggttaaaggccgtcataaaggccaccagcgccacaacaaacacccatgacggaatggagggcaccagcgcttcaaaataaattttcgccaacagaatgttgatcatcggcgcgaacagataatcgagcagagaagaccaacccaccataaagccaacggtcgggctgatggatttctgggcataggtatacgccgaacccgcggaagggtagcgacgcaccagtttcccgtagctcaacgccgtaaacagaatcgcgattaacgcgaatgcatacgccgtcggtacgtgaccgtcagtgaggcctgaaacgataccaaatgtatcgaacagcgtcatcggctgcatataggcaagacccatcattacaaccggaactaacgtaagcgttttacgtaattccacgcgagaggtgtttggagtaacgttatgcgacatggtcattctcctttacggcgaatgccgtcgcgtaagcaaaaaattgccccattttctggattcctcagcgacaacaactgtcgatttttaagtaagtatctatccggtacgaagcccggcctcttggtattgaatgatgtgtttgaagcaaaaaaataaccgacgcgtattaaaacgtcggttagtgtcattttttgcaagcggcgtattctgccctaaattgaagtgaaatgacaagagaatgcgagcgcgttcaaaaaattatttttcataagcgattgatttttaaaccggcgattttgcatacaccccagcaatagcattatttgctaaaatttcatcccgccaccagccactggccagcccggcggtctgttcattccagccaacccacaccggttcatagacgatttgcgccacaactttcttctctataagcgcgccgctttccaaaaatcgctgcgccagataacgcggtaaatagccgcatcccaggccgctaatttgcagctccagcttggttttaaaatcaaacacggtaatcgcttcctgagcgtcgagcagttcagaccctattgatcgcgaggaatggacgctatcgccaaccacaatcgcgcgaaaacgtttgatcgtctggcggctaagcggttcctcttcatgaaccagcggatgatgaggggcgacggcaaacaccagttcaaggtcgcccagtcttgcaaagccaaagccggtgtcaggcggcggcgcgcgcatggcgccaacaataatatccgcccttccctgcgtcagcgtctcccatgaaccgccgagaacgccattaacaaatttaaggcgcgttacgctgtggcgttgataaaaagcgtcgataagcggggccagaagagaaaagggaaaggtatcatccacaccgatgaccagttcgttctcccagccttcatgcagtttaatcgcctgcttttccagctcgcgaacggtgtgcagcacttcacggcctttttccagtagcatcttaccggttcgcgtaaatcgcgcgcgatgcccgctacggtcgagcagttggatattaagatcgttttccagcttatgaacggtataactgagggcggacggcgttttaaataattttgccgacgccgccgcgaagctgccttctttttctaacgcatcaagaataatcagaacgtccagcagtggtttcatactcgtccccttgcgctatatggcgaccacctgctggacagcgactcactccatcggcatcaccaacggatcgggatattgatattcaaatcccagctcattacaaatccggctaccgtcgataatcttccctttgccgttgtccggtgcgtcacgaaaatgcggcggcgccattcccagcaagcgcgtcatttgcggataaaacacgttgcgggctggatgcgccggcgcacatatattatagatgtgccctcctttcggcgcctgtagcaagagggtaattgcgccaaccacgtcttcaagatgcaccagattgaccccgtgttgaccatccggcgcggtttttccggcaaagaaacgtccgggatggcgcccaggcccgaccaaccccgccagccgcagaatatccactgacgtgcccggcagattatgcagccaatcttccagttccttcagggtacgcccgctggccgtgaccggattacgcggcgtattctctttcaccacgccttgcgcatcgccgtaaacagacgtcgaactggtaaaaataatacgcgggatacgataagccagcgcgctgtcgaccagctcctgcatcgcctgcagataaaaatcctctcccggaccgctacggcgcgcgggcagtgttatcaccagcgcatcgacatccagcagagcgtcaagatcgtccgcctcacagaccaactccggctccagacgcagcggatagctttcaattccactcatacgggccgcttccaccccgtcaagggtggttttgctgccggtaacctgccagcctctcgctgccagcgacattgccagcggcatgcctaaccaacctaaaccgacaattgcgacctttttcatccattttctcctgactttaacgccttatacataaggctacgccagcccgccgtgactgacaattcatactataaatgcgaaatgaaaaaagcgcttgctttaaggcgtaaaagtggtttaggttaaaaggtatcaaatgaataagcattcatcggaatttttatgacacgcgttcaatttaaacaccaccatcatcaccatcatcctgactagtctttcaggcgatgtgtgctggaagacattcagatcttccagtggtgcatgaacgcatgagaaagcccccggaagatcatcttccgggggctttttttttggcgcgcgatacagaccggttcagacaggataaagaggaacgcagaatgttagacaacacccgcttacgcatagctattcagaaatcaggccgtttaagcgatgattcacgagaattgctggcccgctgcggcataaaaattaatttacacactcagcgcctgattgcgatggcggaaaacatgccgattgatatcctgcgcgtgcgtgatgatgacattccgggtctggtaatggatggcgtggtcgatctcggtattatcggcgaaaacgtgctggaagaagagctactcaaccgccgcgcacagggcgaagatccacgctatttaaccctgcgccgtcttgacttcggcggctgccgtttatcgctggcaacaccggttgacgaagcctgggacggcccggccgcgctggacggtaaacgtatcgctacctcatatccgcacctcctcaaacgctacctcgaccagaaaggcgtctcttttaaatcgtgtctgttaaatggttctgtcgaagtcgcgccgcgcgcggggctggccgacgctatctgcgatttggtctctaccggcgcgacgcttgaagctaacggcctgcgtgaagtcgaagttatctaccgctctaaagcctgtctgattcagcgcgacggtgagatggcacagagcaagcaagagctgatcgataaattgctgacccgtattcagggcgtgattcaggcgcgcgaatcgaaatacatcatgatgcacgcgccaagtgaacgcctggaagaggttatcgccctgctgccaggcgccgaaaggccgacaattctgccgctggcaggcgagcaacagcgcgtggcgatgcacatggtcagcagcgaaacgttgttctgggaaaccatggagaaactgaaagcgcttggcgccagctcgattctggtactgccgatcgagaagatgatggagtgatctgacgcctgatggcgctgcgcttatcaggcctacgtaatgcgttgatattttgggttctgtaggccggataaggcggaaccctgtgatggagtaaagaccatgagcttcaataccctgattgactggaacagctgtagccctgaacagcagcgtgcgctgctgacgcgtccggcgatttccgcctctgacagtattacccggacggtcagcgatattctggataatgtaaaaacgcgcggtgacgatgccctgcgtgaatacagcgctaaatttgataaaacagaagtgacagcgctacgcgtcacccctgaagagatcgccgccgccggcgcgcgtctgagcgacgaattaaaacaggcgatgaccgctgccgtcaaaaatattgaaacgttccattccgcgcagacgctaccgcctgtagatgtggaaacccagccaggcgtgcgttgccagcaggttacgcgtcccgtctcgtctgtcggtctgtatattcccggcggctcggctccgctcttctcaacggtgctgatgctggcgacgccggcgcgcattgcgggatgccagaaggtggttctgtgctcgccgccgcccatcgctgatgaaatcctctatgcggcgcaactgtgtggcgtgcaggaaatctttaacgtcggcggcgcgcaggcgattgccgctctggccttcggcagcgagtccgtaccgaaagtggataaaatttttggccccggcaacgcctttgtaaccgaagccaaacgtcaggtcagccagcgtctcgacggcgcggctatcgatatgccagccgggccgtctgaagtactggtgatcgcagacagcggcgcaacaccggatttcgtcgcttctgacctgctctcccaggctgagcacggcccggattcccaggtgatcctgctgacgcctgatgctgacattgcccgcaaggtggcggaggcggtagaacgtcaactggcggaactgccgcgcgcggacaccgcccggcaggccctgagcgccagtcgtctgattgtgaccaaagatttagcgcagtgcgtcgccatctctaatcagtatgggccggaacacttaatcatccagacgcgcaatgcgcgcgatttggtggatgcgattaccagcgcaggctcggtatttctcggcgactggtcgccggaatccgccggtgattacgcttccggaaccaaccatgttttaccgacctatggctatactgctacctgttccagccttgggttagcggatttccagaaacggatgaccgttcaggaactgtcgaaagcgggcttttccgctctggcatcaaccattgaaacattggcggcggcagaacgtctgaccgcccataaaaatgccgtgaccctgcgcgtaaacgccctcaaggagcaagcatgagcactgaaaacactctcagcgtcgctgacttagcccgtgaaaatgtccgcaacctggtaccgtatcagtctgcccgccgtctgggcggtaacggcgatgtctggctgaacgcgaatgaattcccgacagcggtggagtttcagctcacccaacaaacgcttaaccgctacccggaatgccagccaaaggccgtgattgaaaactacgcgcaatatgctggcgtaaagccggagcaggtgctggtcagccgcggcgcggatgaagggatcgagctggtgatccgcgccttctgtgaaccggggaaagacgccattctctactgtccgcccacttacggtatgtacagcgtcagcgccgaaaccattggcgtagagcgccggacggttcccgcgcttgaaaactggcagctggatctacaggggatttccgacaaccttgacggcacaaaagtggtgttcgtttgtagccccaataatcctaccggacaacttatcaacccgcaggatctgcgcacgctgctggagttgacacgcggtaaagcgatagtcgtcgccgacgaagcttatattgagttttgcccgcaggccacgctgacaggctggctggttgaatatcctcatctggttatcctgcgcacattgtcgaaagcttttgcgctggcgggtctgcgctgcggctttacactggctaatgaagaggtgatcaacctgctgttaaaagtgatcgccccttatccgctttctacgccagtggcggatatcgccgcccaggcgctgtgcccgcagggaataaacgcaatgcgcgatcgcgtggcgcagacagtgcaggaacgtcagtatctggtgaatgccctgcaacagaccgcctgcgtagaacacgtctttgactctgaaaccaactatattctggcgcggtttaccgcctccagcagcgtgtttaaatccttatgggatcagggcattatcttacgcgatcagaataaacaaccttctttaagcggctgcctgcggattacggtcggcacccgccaggaaaaccagcgcgtcattgacgccttacgtgcggagccagtatgagtcagaagtatcttttcatcgaccgggacggaaccttaatttccgaaccgccgagcgattttcaggtagaccgctttgataaactggcctttgagccagaggtgattcccgtattgctgaagctgcaaaaagccggttttaagctggtgatgatcactaaccaggatggacttggcacgcaaagcttcccgcaggcggacttcgacggaccgcacaacctgatgatgcagattttcacctctcagggcgtatgctttgatgaggtgctgatctgccctcacctgcccgcagacgactgcgactgccgcaagcccaaagtgaagctggtggagcgttatcttgcggaacaagcgatggatagcgccaacagctatgtgattggcgatcgtgcgaccgatatccagctcgctgataacatgggcattactggtttacgctatcaccgtgaaacgctgaactggacgatgattggcgaacagctaacgaaacgcgatcgttatgcgcatgtggtccgcaacaccaaagaaacacagattgatgtcagcgtctggctggatcgcgaaggcaacagcaagattaataccggcgtcggcttctttgaccatatgctcgatcaaatcgccacccacggcggctttcgcatggagattaccgttaagggcgatctctatatcgacgatcaccacacggtagaagataccggactggcgctcggtgaggcattaaaactggcactcggcgacaagcgcggtatctgccgttttggctttgtactaccgatggatgaatgtctggcgcgctgcgcgctggatatttccggtcgtccgcatctggaatataaagctgaatttacctaccagcgtgtgggcgatttgagcacagagatgattgaacactttttccgctcactctcttacacgatgggcgtcactctgcatctcaagactaaaggtaagaacgatcaccaccgtgtcgaaagtttgtttaaagcctttggtcggacgctacgccaggctattcgcgtggagggcgatacattaccgtcctcgaaaggagtgctgtgatgaacgtcgtcatccttgacaccggctgcgccaatttaagctcggtaaaatccgccgtggcgcgccacggttacaccccggtggtcagccgcgaagcggaaatcgtattacgcgctgacaaactctttctgcccggcgtcggcacggcgcaggccgctatggatcaactgcgcgaacgtgaactgatcgacttaattaaagcgtgtactcagccggtactgggtatctgcttagggatgcaactgctgggtcgtcgcagcgaagagacgcgcggcgtggatctgctgaacattatcgaacaagacgtgccgaaaatgaccgactttggtctgccgctgccgcacatgggctggaatcgcgtgtatccgcaggcgggcaaccggctgtttcagggcattgaagatggcgcctatttttactttgttcacagctacgcgatgccggtcaacccgtggactatcgcccagtgcaattacggcgagccgtttaccgcggcggtacagaaagataatttcttcggcgtacagttccacccggaacgttcgggcgcggcgggcgcacagttgctgaaaaacttcctggagatgtaatgattattccggcattagatttaattgacggcaccgtggtgcgtctccaccagggtgactacgcccggcagcgggattacggtaacgatcccctgccccgtttgcaggattacgccgcccagggcgccggggtgctgcatctggtagatctgaccggcgctaaagatccggctaagcgacagataccgctgattaaaaccctggtcgcgggcgtgaacgtgcctgttcaggtcggcggcggcgtgcgtaccgaagaagacgttgcggcattactgaaagctggcgttgcccgtgtggtcatcggttcaacggcggtgaaatcccctgacgtggtgaaaggctggtttgaacgttttggcgcgcaggcgctggtactggcgctagacgttcgcatagacgaacacggcaccaagcaggtggcggttagcggctggcaggaaaattccggtgtctcgctggaacaactggtggagacctatctccccgtcggcctgaaacatgtactgtgtaccgatatttctcgcgacggcacgctggcgggctctaacgtttcgctgtacgaagaggtatgcgccagatatccgcagatcgcctttcaatcctccggcggtattggcgatatcgatgatattgccgccctgcgcggcaccggcgtgcgcggcgtgattgtcggacgcgcgctgttggaagggaaatttaccgttaaggaggccatccaatgctggcaaaacgtataattccgtgtctggatgttcgtgatggtcaggtggtgaaaggcgtacagtttcgcaaccatgagatcattggcgatatcgttccgctggccaaacgctatgccgacgaaggcgcggacgaactggtgttctatgacattaccgcctccagcgatggtcgcgtagtcgataaaagctgggtggcgcgcgttgccgaggtgatcgacattccgttttgtgtagcgggcggcatccggtcaattgacgacgccgccaaaattctttctttcggggcggataagatctctatcaactccccggcgctggctgacccaacgctgattacccgtctggctgaccgttttggcgtacagtgtattgtcgtcgggattgatacctggtttgacgacgccacggggaaataccatgttaaccagtataccggcgatgaaaaccgtacccgcgtgacgcagtgggagacgctggactgggtgcaagaggtacaacagcgcggcgcgggggaaatcgtcctgaatatgatgaaccaggacggcgtgcgtaacggttacgatctgacgcagttgaaaaaagtccgtgacgtttgccgcgtgccgctgatcgcctccggcggcgcgggcacgatggaacactttcttgaggcattccgtgatgccgatgtcgacggcgcgcttgccgcctccgtttttcacaagcaaatcatcaatattggcgaattaaaagcgtacctggcaggccagggcgtggagatcaggatatgttaacagagcaacaacgccgcgagctggactgggaaaaaaccgatggcctgatgccagccatcgtgcaacatgcggtatccggcgaagtattgatgctgggctatatgaacccacaagcgctggacaaaaccattgaatccggccatgtcacgttcttctcacgcacgaaacagcgtttatggaccaaaggcgaaacctcaggccatgtgctgaatgtcgtcagcattgcgccagattgcgacaacgatacactgctggtgctggcaaaccctgtcgggccgacctgccacaaaggtaccagcagctgctttggcgacgccagccatcagtggttattcctgtatcaactggagcagctactggcagagcgcaaaaccgccgatccgaccagctcttacacggcgaaactgtacgccagcggtaccaaacgtattgcgcaaaaagttggcgaagaaggtgtggaaaccgcgctggcggccaccgtcaatgatcgttttgaattaaccaatgaagcgtctgatttgatgtaccacctgctggtgctgttgcaggatcaggatctcaacctcaccaccgtgatcgacaatcttcgtaagcgtcatcaataagcgtaaaaaaaccgggcaatgcccggttttttaatgagaaattttacctgtcgtagccgaccaccatccggcaaagaagcttacaaggcttttggcttatagctacgtagcgcattgcgtcccagcacaatcccggcaccgatcatcccacccagcaatacagccagcacaagggtaatggctgttttcgggctatcgcgacggaccggcagcgtcggcttcatcacataacgatagacgtgcaccgtatcggcagtcactttcagatttttaatgtccagcagtgtctgcttcgtctggtaataggccggagaaaagaccagtggacgcgtcgcttcgttctgtatcatcgattttagcgcatcgctccccaacaggaacatcgtgtcctgggtaacatcctgggtttgctgaatctgcggctgcgtgattttggcctcatccgcatagcgcaacgcttcttcgatttgcttaatacgcagatctttttgctcctgcgccacaacttcctgcgtctcaagggactcctgcaacgttttggtttgcagcgtgatgttatctttcaggtcaacttccagttccttagcgacctcttcatccacctgttggatatattccgccagccgacgctgcgccccttcagcggtagtactcacataagaaaccgagagtggcagcgcctgcccttttaccgactgttcaatggtaagcttttcccgctctttctgattatccagcacttccgataatgcggaaaacgcagagctaaagcggcttataaaattcgcctgcacttcagagattttgggggcattcccaccatacaagacgttgagcgcgttggtataggtggcaacctgcgcggcatcaggttgggtaataatcgccgtggatgtccatttttctttggctatcatcaggtagcctacagccagcaaaatggcgataataacggctacaataatggtcatcttcccacgccataactgtagcaataactcaatcaaatcaatctgttccggatcgttcccacgcccggaagacgtattactatccactgtcatagataccctaactaaaaaaaggatgaagctggagacagtgtagccataaagcaaatatatgccataggattaatgataaaaatcagacattatttccatttggtcaataaatcatcgggactcatcagccccgattgccttattaatcactaccgaaaagatcgcgggtatacactttttcagcgacatccaaaagctctgccgccatcctgttggaaataatgacatccgcctgctgtttaaagcagtgcaaatcacgttcaagacgtgagttaaagaaagtatcttcttccattaccggctcatagatgatgacctctacgcctttcgctttaatgcgcttcataatcccctgaatcgatgaggcgcggaagttatcggagccactcttcataatcaggcgataaatgcccaccactttaggctttctggcgaggatagcgtcggcaataaaatctttacgcgtacggtttgcttcaacgatagcggagataatattattaggcaccgactgataattggccagcaactgtttggtatcttttggcaaacaatatccgccataaccaaaagagggattattataatgattgccaatacgcgggtcgaggcacaccccttcaataatttgtcgggtatttaatcctaacgtttcagcatagctgtctaattcattaaaataagcgactcgcatagcgagataagtattggcgaaaagtttaatggcttccgcctcagtggagtccgtaaacagcgttggaatctcctgtttaatagcgccttcctggagtaatgcggcaaattctctggcgcgctcagactgttccccaatcacgatacgggagggataaaggttatcgtaaagggctttaccttcacgtaaaaactccggagagaaaatgatattttctgtcgcaaacttctgacgcattgccgccgtgaagccaaccggcaccgtagacttaataatcatcactgctgcggggttgatgctgatcacatcctgcatgaccgattccacactggacgtattaaaatagttagttttgggatcgtaatccgtaggcgtagcaatgatgacgtaatctgcattctggtacgcatcaaacttatccagcgttgccctgaatctgatgttatcttcctttaaaaattgctgaatttctttatcaacaatcggagatatccgatcatttaacagttcaacacgggaaggaacaatgtctaacgccaccacatcatgatgttgtgcaataagcaaaccattagacaagccaacataacccgtcccggatatcgtgattttcattattcgctctcagaattaacttaattatgaatcatgatgtatttcgcatcctgataagatattaaagttttaacgcctgagtatataaagtgcaacgcagacgaaaacaattcagattatcttcattacgataaacacagattattaagttaatattaagcaaaagcgataaatcaataagaatagagataaaaaaaagcccggtattaaaccgggcttaaacatttttgcagaaattattccaaccattcggtatggaaaatgccttctttatcagtacgtttataggtgtgcgcaccaaagtagtcacgctgcgcctgaattaagttagctggcagtactgcggcgcgatagctgtcatagtaggccactgccgcagagaatgtcggcaccggaatgccgttctgcaccgcgtaagccacgacatcgcgcagcgcctgctggtactcatcagcaattttcttgaagtaaggcgctaacagcaagttagcgatatcggcgttttctgcgtaagcatcggtgatcttctgcaggaactgagcgcgaatgatacagcccgcccggaaaatcttagcaatctcgccgtagttgagatcccagtgatattcatcagacgcggcgcgtagctgcgagaagccctgcgcataggagacgatcttgccaagatacagcgcgcgacgcactttctcgataaattcagctttgtcgcctgccggctgcgctttcggcccggagagcactttagatgcggcaacacgttgcgctttcaacgaagagatgtaacgcgcaaagacggattcggtaatcagcgacagcggttcacccagatccagcgcgctctggctggtccatttaccggtccctttgttggcggcttcatcaagaatgacatccaccaggtagtttccgtcttcatcttttttagtgaagatgtctttagtgatgtcgatcagatagctgctcagctcgccgttattccactcagtaaaagtgttcgccaactcttcattgctgagattcaggccgcctttcagcagggagtaagcttcagcgataagctgcatatcgccatattcaataccattgtggaccatcttgacgtagtgaccagcaccatcggcgccgatataggtcacgcacggttcgccatcttctgccacagcagcaatcttcgtcaggatcggcgccaccagttcataggcatctttctgaccgccaggcatgatagatggccctttcagcgcgccctcttcaccaccggaaacaccggtaccgataaagttaaaaccttccgcagacagctcgcgattgcgacggattgtgtcctggaagaaggtgttaccgccatcaataatgatatcgcctttttccagatacggtttcagcgaatcgatagctgcatcagtacctgcgcccgctttcaccattaacaggatacgacgaggcgtttcgagggattcaacaaactctttcaccgtgtaataaggcaccagctttttgccgggattctcggcaatcacttcttcggtcttttcacgggagcggttgaaaacggagacggtataaccacggctttcgatgttgagcgcgaggttgcgccccatcactgccataccgacgacgccgatctgttgcttggacattacatactcctgtcaggtgtggaaaccctgccacaaacggtcatggcaggttaaaggtgaatagtatgttaactcaaaggtatgatattaaggtagcgattgatgcgttcagattttacgcaggctaatttatacaattattattcagtacttctcggtaagcttaatacgcaccatctcgccgcaaaacaactttcgctgttttaaacagaatggcaatatcattccaaagcgtccagtttttaacataccaggaatcaaaataaacacgagtgtcataatcaacatcattacgcccactcacttgccatagacctgtcatgcccggctttgccatcaaataataatcaacatcatcacaataacgctccagttcatccgaaacgataggtcgtggtccaaccaggctcatatcaccttttagtacattaaaaagttgtggcaactcatcaaggctagttttacgtataaatcgacctacagctgtgattcgaggatcatttttcagtttaaaatctttctcccattcagccctggcaataggatcgttagccaaaagttcttttagtacctcttgagaattcataaccatagaacgaaatttgtagcatggaaaaagttttccatgccgacctactcgctggtgaccataaatagccggaccaccatctcgagtaactttataccacagataaatcataagtggtgatgcaattataagaatcattattgaacaaacaatatcaaatgtccgtttgagaaaacgggacgaccttttagccaagttattttgtatccttaataacataacttcatggctaaagataaaagacatatcagtattatataatggcaatcctctaaacgaggggactacagtaacagaacgacaatgatgttttgaaagttcacgtagccaaaaatgtgttttctccaactcggtgtattcataagcaaggatataatggacatcacctgtacgatttaaatcccaaataatctcagtatcctttatcaccggcaacatatttatttcagcatctgacgcatccgtatcaaaaaaagcgataacatcaaaccccatcatctcctcactttgcagcgcagaatatgcaccacgagcattctgtccgctccccaggatgatagtttttttcttccagatacctagcttgttcaataaatgctttgtaagtgcgcgaaaaaaaggcaccaggattagggcaaaagtccaacaaaacacccagacatagcgtgaaaactgccattttgtaaacgctatcagagccaaatcaaatatagcaaaaataacgatcgtacgaaaaatttcttttaactcataccaaaatggcttgcggtatgtataatgtcgcaaacgaatccaaaaccaaccgacacatactactgacaaaataaaatgcgtaataactcttgtatctaattggtcttgaggaataaatcgctgtacttgatcaaaaataaaatagacacatcctaatgaaaaccataaggctaaattaaaaaaaatcaaatccgatatagccaaaaaaattttacatagctgtggattatacttattatcaatattatccatttaatcctcaccctctgaccgtgcataatgtaaataaaataggcatattaagtaaataacattcaatttttttacagcaagcatcgttttttaatattagcaagcgttgtatttacaagatcctgagccctatttaataaattagcttctgcatagcagcgtaactcaggtgcattaccagaagcgcgcaaatgcacaatacatccatcacgtaaagtaattcgcataccatctgtcatatctgtagaaattgcaccttcattctccaaaccaatatagcttaagaggttgctcagattttctctgcccatactaattaaggattgacttttatcagttgtaatcccctgtaatctgtcagaatgggtgtaacgagttgggagttcattgactaaagcgctaatgctggtattcctacttttgtaaagcagcattattgctggtaatacagcatcacgagttggtaaggcatgaagattctgctcgttaatacagatgtcgcttcctaataaaaaaccgccattggcttcaaaaccgacaatacgactataactccgcgataattcattaaaagcttcgataacataaggcgagccaatttttgtaagcttaacatgtttaaaaaagcggccagaagaaattatgctgttacaactaacaggaatagcgacggcttctgcatccaatgcaagtgaacataatagacctagtatatcgcctcttagccactcaccggcctcatcagcaataagagggcgatcaccatccccatctgtcgagaatatggcatctaaatcgaactctttagcccatgagcgagctttttcccgatcctctttgcttacagcctctgtatctataggtacaaaattatcgcttctacccaagctaacgacttcagcccccaatgcaataaataaaggcttataaagatcacgcccagcgcttgaatgttcgtaaataccaatacgcttatttttcaggaatggagtagaaaataaagatgtataacgagatatataattaacagcagccatttctgaaactatgagttctttaagctctaaatggctgcacgtatcttcaacactaaggatcgcagcctcatcatgtttcgtgatttcaccatcaggacgataaaacttgaggccgttccgctcgaatggaatatgacttcccgtaaccattatcgcaggcatattgtcagacatagactgaaaggccaaagctggggttggtaccactccataaaaaatacagttaacgcctttatccgccaatgcagcagcacacgcctgagccatcccataactacttggacgattatctattgccaatgctacggtatcaaaggaaaaatgttcctgcataacggcaacaaatgaaaccgtaaaagcagcacatacctgaggtgtaaaatcttttacaagaccgcgagccccactcgttccaaacacaatacctgatgaataaataacatcacggctattattaactacgttcattagtccactccttcgaaaatccagaacgttgttctaaacgaataatatcatcctcaccaagataggtacctgattgaatctcaattaacttcaggggggtcattccaggattttccagcgcgtgaatagtattcggaggaataaatgttgattcattttcagaaaccatataagtctgctctccctttgtaacacgagcagtcccggataatactatccaatgctcagcccggtggtgatgcatctgcgccacaaatttctcacccggcttaacagtgatacatcgaacgaggtaatttttgccgctatcaatcacattatattttccccaggggcggaaaacttcttgatgttgtttatattcgttcctatcattccgttttaaataatcgacaatttttttaacatcttgtactgtatctttattagccaccagtaaagcgtctgttgtttgaacaatgacaagattgcttacaccaatcgcacttataaacatatcttcggaataaatgtaattatcattacaagcatgtgcgaaaatatctccttttaaaacatttctctgatgatctttattcgatatatcccaaagtgaggaccaggaacccacatccgaccagccagcgctcattggtatcaccaccgcatgctgtgtgtgctccataactgcataatcgatagaatcactcgggcatgacataaactcttctttatcaatacgaataaaatcaagatcgggatttatatgtcctaccgccttttcacaagctttataaatttcaggtgataaatactttaattcgtttaaataagagcttgcacgaaataaaaacataccgctattccagtaatatttccctgatttgaaatagtcaccggcggtatcgatatccggtttctccacaaattcagccactgcataagcgtcatttcctatcaactcaccacgacgaatatatccataacccgtttcagcatgcgttggaacaataccaaaagttacaagcttaccatttgcagcgtattcttcagcatgtctgacagctttcgtaaaagctatttcatcctgaatcacatgatctgcagcaagaaccaacaaaagaggatcagcattatcagcattctggagcgcacaaaacgcggcaagagcgatcgctggtgcagtattacggcctaccggttcgagaataatattatttgctaacttgtcaatttcacggagttgttcagcgactaagaaacggtgtctgtcattgcaaatgacaacgggttcttctgtagaaagtgaagctaatcgctttatagtattttgcagcattgatagtttaccttcaacgcttagaaactgcttcggatgatattcgcgtgaaagcggccataaacggctacctgtgccgccagccataattacgggaagaaaagacatttattttatctcttttgacgaagaatattggatattattccaataactcttgtacatgctaaaatagcgacatgtagacaacggtaaagattgccaatgcttgcctaatttgtaacccaagaatttagcaaaggttgttaataaagctcttggaatccagaacggtgcatttttaagcaggaattgaatctctgattttacgaagcggaaaccctcaccaccggctccgccaaagtcacgctgaatccacggagaacaagcatgaaatacaccagtatcaaaatatcgttgaaactcttctcgcggggtataattatgggagtgtcttaccaccgcttcagcgcagtaggcgaccttataacccgcctgaatcatcttagccgccataaacatatcctcggcaagaattgtatgttcaggaaacccacttaactcttcaaaaacggaacggcgataggcagcaaaagaattggacataaatacagttttaatacccaatttttctatatctgccttacttttaacaatagattttgaactataattaaaatttctggcatgcactgcaaggggattagcatctttatgaggaagttgtctaccacaaaccgctgctatcaatggatctgaaaaataataaaccaaatttttaattgcatccgaatccgcgagaattgcatcttgcgttagaaaaattataacatcagcgtccagagtttttgcaactgctaaatttctggttcctccatgattaaaatctttagagtcaatattaaatattgatatatttttcaggtctgaggctaacggaaccgtttcatctttagaacctgagtctataacaatcaatttatccggatatatagtttgctgcttaatcgcatccagaacattaggccaaagcgaccctgcattatatgtgggaataattaatgttattttcatttattttgattccgccaaccaattgccaaccatctgcttcatattatcaaagtcataccgtgcgacatagttgttaaatcgggaaattgcatcaggcaactgctctatatttttaattgcactctgccagcttttttcatcatccggattcacatataatgcaccattggttaacacttcatgaaatactggtatatcggacactataactggagtatttgatgccatcgcttcaataggaggtataccaaaaccctcatcaatagatggataaacaagcgcgtaggctttagaatataaaatctttaattcattaaatgagacttcatgtaaaaaagtcactttatcttttagttccagatcaacgaccatttgttggagagacattgcatagtcagtacgaccacatacaataattaaattataagagtcagaccaaacttttttattttttatgaatgaatgaatatttttatgtggccaacttgcaccaacagctaaaaagtaattctctttttcttttttttgtataaaatcagatttattaacactattataaattactgatattttctcactatctacattataagttttagcaatgctatctttaacggtataagataccgttaaaacatgcttacatcgcttaacggacatttttaataaaaagcgaaaatacactttctgaataaaactatctggataataaaaaggtcttatatcatgtacggttatcgtttggtttctcagtaaggggatagtgtgatgtgtagtacacaccaattttttattaccaaacttaattaaaaccctcagcgcaagccagtaactatatacataccatactaatggtctaagtcgcgatgtttttgatgtgttgctaacaatattcggaacagtaactactgcataaccgagcttttcaaaataatcagcgtgtaccttgctacagattattgcgtcaacatcagctatttctcgcagtgccgttaaaaatttaatcgagtattgccacattcccgtaccacttttacctaaacgtgataggtttacgatcattgaatagctctccgtttttccatacgcatctttaaagcaataatcataaggataaataatattacgaagcttacactaggtgtaattcttaataatagagttaatgtaataccggcagtaaaacactacaaaaacaatcataaagaaatatattattatactaacattcccagaaaaaaacatctaagtagttaagctatccaaatttatttatatatatcaaatatgatttttcattaaaaagaaaagtcagtaacgtaaatctagctgaatccagaaaggttaaatctacatttaatctcaatataataacttactactacttaattatccgtttagtaaaattcttaagcacggtaatatttttcactgcatatgctagtttcccaaatcgaagtacagtgttgatcatatttttattacaacctagctttgcataaaattcagataaatctcttttttcatcactattgccataacatgccatagccaaagttgtatataaccatggtctctcttttagcaaaacattttcaaatgctcgttttaaagatatatttttactgtaaaaatcattagctaattttaaatatgcaataaaatcaattaaaattcgtctggcctttcctttcttctcgaaactatcattatctcctcggcatattacgagtggttttgatatataatgcaaaaggcaccctggcgtattaaatacgctcatcatgataaatacatgaggataggaagtgccaatataggacgcatcaaaatcaatggcatcccatcgttctttttttactattaaagaacttagatagctaaatacaccaccaatagataagcatctactgagatagatttccctatctaaattattattaaacacataaagttcatcatctgttctgagccaagaacgatgagggtttctaatctcaactaaatcacacccggtctcttttctgtcacataaatatatatctgcttgagaatcgagataagtttgtaatatcgctaacgagtctttcgcaagagcatcatcactgccaaatatccaacaataatccccattcgcaagggatactgaagcaagaaaattcctatctggcccaaggttaacgctattacgccgatatattattgggaaattataattgttcctccaaacatcaatcatttcctctgtaccatcagtagaggcattatctgatatacatatctcaatatctaaattaaatttttcctgattatttatactattcaacaactcttcaagatattcttttctattataagttggaatacaaaatgatataagcatatgattatcccttatttgccttaattaagtaagttagtggaagcccccaaaaaacagttaaagcaaaagatataatcaagccaagcagcactccactgattccaagcgtactagaaaaataccattgtgctattccaccaattattgcttgtagtggtactaatatccaaagtatttttaaataattcatactttgcaataacattgcataagtgtcacaccaaacgcgaatacagaaatatatgccaattaacataaaagataaaatagaaacttgataattaatatctttggctattactgaaaatatctgttctttaaataaataaataaatattgtacatccaacaacatatagtgagccaagcaaaatattgacacctatcattttgttaagttttttccattgctgtttgactctcaattcagcacatataggccataatgcttgcaaaatagcagtataaataaaaaagactaaaccaaaaattttcatcgttactgtatattgaacaatatcagcaggagttagcctttgagaaatgaccatataatctgtttgaagcaccactatcgataataaagtaaaaagaaaaaaccctgaagatctacgtaaaattgctatataatgagattttgttgttttaacatgataaagctttatgtatctatatacaatatagcacaatgaaatcatacccactggaagatacaggactattagtgataattttatgtcaactgagatccccctatagtatatatatagcaagccgagcatacctatcatataagataatgcgtttaatagattagctttccacccgaccaattcggcaaaaagtattttataagcaatagctccgattccaatagaactgaaaaccagacatgaggtaaaaaagagcattctggttttgtcctgtaatacctcatgaaaagaagaaagatatttagcggaaattaccccagaaaaaatataaaataaagcaataaaaaaaataatagctataaagcttagatgtaatgctgatttaatatatgcatcataacttttgtttttggctctgcattctgatatataattttgcagtcctgtacctatgccaaaatcaacagcgctacaccatactaataaaccagttaacaaactaaagattgcatatttctcttcacctagtatagaaataagatatgaaatacttgctaactgcaccccggcaattattattttggataaccatgatgaacctgcaacaattaaatgactcggaatttttaacaattgaactttcactatgcaattaaacgacttagtttttacaacataacgcgactaatttgttaacgatttatttattaaaagatcatgaaaatctcataaccgtttcagtagttcttcaattccttttttataatcgaaatttggtttccagcccattgcttttaaatttttattatttgctacagagaacattatttcattatctctttgctctatcgcaccaaattcaaatatactcgatgaacctggcatcatagtattttgcaaataaaccagaaaatctttcaaacttaccccagcaccagttccaacttgatactcagtatatgaaggtacttcttttctattttctaatatagttaaataagcatttaccacatcatctacaaaaataaagtctcttatctgttcgcctgttgtacatttcacgcaactctgttttttatttaagcagtcgataatgtatggaataaatttattttcaccatccccaggcccatatacatgctctaatcgcatgtttacaaatgaaatgtcatgcatattagcataataatgcccaatttcatcaaagtgtcttttagtaattatataaggccgcatatgttgataattaaaatctttcttggcaaaaaaactatctgtatttaaaaagatatccgcccgatattttattgccaaatcaagaagctttaatggttttataacatttgcatcttcaatatttatgagagatgatgttttatgcccatattctgttgccaaatgaatgataccaattaatgcagaatcaattgataactcctcgactaataattcgatattatcccaactgcaccatctaacattagctaatgcattactattattttttattacatctcgagtgattgcgacaactgaaatccccgatttttttagcgcttcgagtaaatgcttaccaataaagccggaagccccactgacaattacatattctttcaaaaaggtcatcgcaatcaccagatagaataaattgaattagaaattcaaaccaaagaactcttcaaacttgctaactacataatctaaatgctctgtagtcaagcctggataaataccaatccagaacgtttgattcattatacggtcggtatttgtcaactcacccactacacgatatttcacattagcaaaatacggttggcgaatcagatttccagcaaacagtaaacgtgtaccgatttttgcttcatcaaggaatttcaccagttcgacacggttaacaccgctagtttctttcagggtgatagggaagccaaaccaggatggatctgatttctctgttgcttctggtaattcgaggaattcagtgcaagattgcaagccctgtttcagataggaaaagttagctttacgctgctctacaaactcttctacgcgctccaactgagccagaccacatgctgcctgcatgtccgtgattttgagattatatccgaggtgggaataagtatatttgtgatcatagccttgaggaagtgatcccaattgctgaccaaaacgtttaccgcaggtgttatcgcatcctggcgcacaataacaatcccggccccagtcacggaacgactcaataattttcttcagttcacctgacttggtgaatacagcaccgccttcacccattgtgatatggtgagccggataaaaactaacggttccgatgtcaccaaaggtacctaccatctggccttcataagtcgtcccaagggcatcacagcagtcttcaatcaaccataagttatatttatcggcaatccgacgaacttcactcaggttaaatgcattaccgagtgtatgagcgatcattatcgcttttgatttctcagtaactgcagcttcaatgagagaggcatcgatattatatgtcgggatatcaacatccacgaataccggtattaaaccattctggatcgccgggttaactgtagtcgggaagccagcagcgacagtaataacctcatcaccaggtttgagagctcgctcgcctaattttggggaagtcagcgcagtcagtgccagcaagtttgccgaagagccagatgttgtcgttaaaacatgaggaaccccaataaattccccaagttttttttcaaaggcatcattgaaacgaccagtagttagccatccatcaagagacgcctcaaccatcaattgtaactctttggcaccaataaccttcccggaaggaggcacaacgcttgtacctgcaacaaaaggtttcgggctcaatgcctcattcgcatactgagcgacaagctgagagatttgctcacgcaggttatttgctgtcattactttgattccttaaacttattttcttaacgagtagttgcagacatatagtcgctgatttcacgctttgaacaaatcaacatatcttcgccgcgaatccatgctttatgccattttacgatgcgaccaagtgtttcagtcaatccccaacgcggatgccatcctaattgcatatttgctttagagcaatccagtttcaggtaatgtgcctcatgaggatgattctcaccatccagtaaccagcttgcatcatcaccccaaagcgtgaccatcttgtcaacaataaattcgaccgtcttcgcatcttcatcacgcgggccgaaattccatccttcagaaaacttagcaccttctgtatataagcgttgcgccaccacaatgtaaccagaaagaggctccagtacatgctgccagggacggatagaatatgggtttcgaataataacctgctggttattttcaaatgagcgcagaatatcgggaattaaacggtctttagcccaatcgcctccgcctatgacattaccagccctcacagacgccaaaccaacgccatgttgctcataatttgcaggattgaagaatgagttccggaatgcagacgcgactaattctgcacaacctttactattagagtatggatcgtaccctcccatgggttcgttctcacgatagccccacacccactcacgattgtcgtagcacttatcactggtgatatttacgactgcctttatgttacctacttgcttaactgtttcaagcaaatggacagtacccataacatttgttgagtatgtttcgattggctgttcataagataggcgcactaaaggctgggctgccatatggaaaacaatttctggcttaaattctgcaatagaattgcgcagcttttcaaaatcacgaatgtcgccaatatgagattccataagatcattaagacgcactatctcaaataaacttggaacagttggcgcatcaagtgcatagccttttacaattgcacccatttcagtcagccatagcgaaagccagcttcctttaaagccagtatggccggtaacgaatacacgtttaccttgccaaaaatttttatcaatcatctagttactcccaggttttccacggagctttacctttttcccacagcccttcgaggtaaactttatcacgtagggtatccatcggctgccagaaacctgggtgttcaaaagccattaactccccctgttgtgccaatgtcattaatggctcttgttcccaggttgttgcatcgttatcgatgagatcgataaccgatggattcaacacaaagaaaccaccattgatcattgccccatcgcctttcggtttttcctggaatgaccggacctgaccagctcggatatctaatgcgccaaagcgtcctggtggaaaagtagctgttaaagtcgctttcttaccgtgagccttatggaaatcgatagtcgctttgatatcaaggtcggcaacgccatcaccataagtaaacaggaaagcctcgtcatcttttacgtattcagcaacacgtttcagacgaccaccagtcattgaagaatcacccgtatcaaccaatgtgacattccatggttcaacacgtttatggtgaacttccatacggttttcagccatatggaatgttacatctgacatgtgaaggaagtagttcgcaaaatattctttaatcacatatcctttataaccacagcagataataaaatccttgataccatgcacagaatacattttcataatgtgccaaagaataggcttgccaccaatttctaccatcggttttggttttacaattgtttcttcacttagtctggtaccaagtccaccagccaggatgaccgctttcataaattatcctcaatattattagatgcggtaaatgcatcagaatagaaatgttctacagagagatttttcatcataaagtcctttttactggcatcgatcatcacaggtgaaccacatgcatatatatcgaagaactctagagaatcaaaatcatccatcacggcatgatggacaaatccctttcttcccccccattcggcgtcatcaccagaaacaacagggatataatgaacgttgtcgtgctgttcactccactgctgcggtaatgcagagtaaaaatctttactatattgcattccccagtaaatgtagatctcacgacgacattttccctgaatgagatgctcaaccattgatttaactggagcgaatccagtaccgcctgcaaggaagattataggtctgtcactttcacgaataaaaaatgttccgcaaggcccttcaatgcgcataagagtattttcttgtaactccccaaaaatgagcgaactcatctgaccattgggaacattccttacatgcaactcaataccattcgactcatcactattagcgatagaataactgcgagttacacctttataatgtaaattgatatactgccctggaaggaagccaatttttgctgttggtggtgtgcgtaacttcaaagtcataacatcgcctgaaaccagtacagcactatttaccttgcatgggacaattttttttgtctgtccagctagttcaggaaaaaaatgcgcatttagctcaagggcggttttaggtttacagcagcaggttagtattttatcaccctgtccaaaaatattacctttggagtcaacaacttctcccgccaacaaatcggactcacagataccacaatcacccgctttgcagctatgttcaagatggataccagccgatagcgcagcatcgaggattgattcatcctctctaccggaaaattcaatatttgatggaaaaatcttaataatatgagacacgatgcttactctgttaacaaggcttgatccagtaaaggtgctgcagcatcttttgctgaaagctcaggcagctgagaaaaaggccattcaatacctattgcctcatcattccatagaatgctaccttccgatgaaggtgagtaataattagttgctttgtacagaaactctgcatactcactaagagtaacaaaaccatgagcaaaaccttctggaatccaaagctgtcgcttattctcagcagacagatttacaccaacccattgaccaaaagtaggcgattcttttcggatatcgaccgcaacatcaaaaacctcaccgacagcacaacgaactaacttcccctgtgcattttctcctctctgaaaatgtagccctctgagtacgttctttttggattttgaatgattatcttgaacaaatgtaactttacgtccaatcaactcttcaaaggtctgctggttataactttcaaaaaagaatcccctctcatcgccaaaaactttaggctctaagatcaagacatctggtattgctgttttaatcacaatcatcacttataaacctttcaccatcttcagcaaatatttgccataatcattttttgataatggcccggccagttctataacctgttgtgcatttataaaatttttacgaaatgcgatctcttccgggcaggacacttttagcccctggcgttcttcgatggttgcaataaaattactggcctctatcaaactctgatgcgtccctgtatccagccaggcataaccgcgccccatcatagcgacagacaatcttccctgctccatatagatacggttaatatccgtgatttctaactcaccgcgagcggaaggcttaagatttttcgccatctccaccacgctattatcataaaaatacagccccgttaccgcgtaattactcttcggttgtaatggtttttcttccagactaacggctgtgcccttttggtcaaactcaaccacaccgtagcgctccggatcgtttacatgataagcgaagacggtagcaccactttctttattaacggcagcttccattaactttggtaaatcatgaccatagaagatattgtcacccagcactaatgcacaatcatcatgaccaatgaactcttcaccaataataaacgcctgtgctaagccatccgggcttggctgtactttatattgaagattcagcccccactggctgccgtctcccagcagttgttgaaaacgcggcgtgtcctgtggcgtactgatgatcaggatatcccgaatgcctgccagcataagcgtggaaaggggatagtaaatcatcggtttatcataaattggtagcaattgcttacttaccgccatggtcaccggataaagacgggtgccggagccccccgctaaaataatgcccttacgcgttttcatttccatttctcattcatagaaaatgccctgatgggcatttaaatttattagatggttgtcgtcgtaaacatttcagtcagcatacgcttaactcctaattcccattgaggcagaataaggtcaaaattacgctgaaacttttcagtattgagacgcgaattgcctggtctgctcgccggcgtcgggtaggcgctggtcggcacagcattaagctcagtcagcgcaagcgttatccctgctttgcgcgcctcgtcaaagactaaggccgcgtagtcatgccaggttgtggttcccccggcaaccagatggtaaagacctgcgacttctggtttatttaacgccacacggatcgcatgcgccgtacagtcagccagtaattccgcaccggttggcgcaccgtactgatcgttaatgactgaaagtgtctgacgctctttcgccagacgaagcattgtctttgcgaaattattgcccttacctgcataaacccaactggtgcggaagataaggtgtttagggcagttatcctgcagggccttttctcccgccagtttggttttgccatagacattcagcggcgacgtagcgtccgtttcctgccatgggatatcgccggtaccaggaaatacataatcggttgaataatgcactacccatgcgccagtttcgttggctgctttagcgatggcttccacactggtggcgttaagtaactgcgccagttctggttcagactctgctttatctactgcagtatgggctgctgcgttaacaatcacatcgggacgaagcttacgaacggtttcggcaacgcctttcggattactaaaatcaccgcaaaactcttttgaatggacatccagggcaatcagattccctaccggtgccagagaacgttgcaactcccagcctacttgccctgtcttaccaaaaagtaagatattcattactggcgtccttcatagttctgttctatccaactctgatacgccccacttttaacattgtttacccattgagtatttgcaaggtaccattccactgttttacgaataccgctttcaaaggtctccagcggtttccagcctaattcgcggctaattttacctgcatcaatggcataacgacgatcatggcccggacgatccgcgacataagtgatttgttcacgataagaagtcgctttgggtacaatctcatccagcagatcacagatggtaaataccacatcgagatttttcttctcattgtgtccaccaatgttataagtctcccctgccttgccttcagtcactaccatatgaagcgcgcgagcatgatcttctacatatagccaatcgcgaatctgatcccctttgccataaattggcaaaggctttccttccagtgcgttcaaaatgaccaacggaatcagtttttcagggaagtgataagggccatagttattagaacaattggtaacgatcgttggtagaccataggtacgccgccaggcacggactaaatgatcgctggatgcttttgacgcagaataggggctacttggcgcatatgccgtcgtttcagtaaataacggcagcgtaacgctgttttcaacttcatcaggatgcggtaaatcgccgtaaacttcatcagtggaaatatgatgaaaacgaaaattattttttttatcttcgccaagggcagaccagtatttacgcgcaacttcaagaagtgcataggtgccgacgatattggtttcaataaatgctgctggcccggtaatcgaacggtccacatgactttccgcagccaaatgcatcaccgcgtccggctggtactgctcaaaaatacgcgttatttcagcggaatcacaaatatccgcgtgttcaaaattgtagcgattactttcagaaatatcagaaagggattcaagattaccggcgtaggttaatttatcaatattaactacagtgtcctgtgtattcttaataatatggcggacaacagctgatccaataaaacctgccccgccagtaataagtatcttcacttttctattccataaggcgtatttaatgtggtatttaatttgccaataaaaattaattgctcaagtcgttacacacgctaccgcccctggctcatcagctaccagtgcactgcgtacatatcgacttgttgcaaacctcgcccagcagggcaaagctcactaaaacttaaacgctaattgtcttattaattgcatccggaaacaaggattaatcttataaaatcagcattaaaatgctccagataaccccttgttacttaagccctttatacaaaactaaaacggcagtcaacactcgtttcagccaacttgccgcttcgaatgttcactgccgttattatgtttatcaccaaccatttatcacggttgttaatacttattcatgcaaaagctgctctatgctcttacggaacttggctccttctttcaggttgcgcagcccgtacttcacaaatgcctgcatgtagcccatttttttaccgcagtcatagctgtcacccgtcattagcatcgcgtcaaccgactgttttttcgccagttcagcaatggcatcggtgagctggatgcggccccaggcgcccggttcggttctttccagttccgcccagatgtcggctgaaagcacataacggcctaccgccatcaaatcggaatccagcgtctgcggctgatccggtttttcgataaactccacaatccggctgactttgccttcattatccagaggttctttcgtctggataacggaatactccgataaatcacctttcatgcgcttcgccagcacctggctgcgacccgtttcattgaaacgcgccaccatcgccgcaaggttatagcgcagcggatcggcggtagcatcatcgataataatatccgggagtaccacaatgaaagggttatcgcccacgaccggacgcgcgcacagaatagaatgccccagccctaacggctgcgcctggcgaacgttcataatcgtcacgcccggtgggcagatagattgcacttccgccaaaagctgacgcttaacgcgctgctcaagaagtgattcaagttcataagaggtgtcgaagtggttctcaacggcgtttttagacgcgtgagtcaccagcacgatttctttgatccctgcagccacaatctcatcgacaatgtactgaatcattggcttgtcgacgatcggtagcatctcttttgggattgccttggtggcaggcaacatatgcatacccaaacccgctaccggtataactgctttcaaattcatcattgtttcttccacctgtaaaatggttgctgaattatagctctttagcttgttttcgccagcatgaattactctgctgccagggataatgatggcacgctctacattacgtcttagtcggcaccataacattaagtatgaacaactttttcccaggaattttcgtaaaaatagcggtacttaccctccccgcttcggcagcgaaaaattcactgcttcgacattcacggtttggtgattaatcctgtcgatatccacggaactctgcccgttttcattgatggcatgaacattagcgagggaaagcagcgtgtcctggcgggccataaattgaccacgtacatctttacgcaaatcgaaatgcatttttaacgccgggccaatcgctgaagtttgcatcacgttgatattgcgcagaaagaggtgctgcggttgattatgcagttccagcgtagcacgcgtcatccgtacattggtgatggcgacaaaagagggggtgttgccggaggaaatttgaatgccgcgtaatttataagcaacctggcgattatccaaccgaatagcgtttaatttaaagttttgcggaattgacaggtattttcctttaacgacgccatagccgatgagcatcccggcactattcgtcatatcaatattatcaatgacgaaattatcacagccataaattgcgatcgttgcgttatcaatacccgcatttttactgaaaccgggcgtgatgtttttggctttgacattgcgaatgacgaaatgtttgccattttctacgtgcacaagctgtcggcaatcagatccggtaatattggccaccacaaagttttttactgcctggtcttcaggataactgttgtcataggtgctacccgccagcccgatgccgatcccccagttgattttgccattggtacaattaatgcgttcgatgacatgatcggaaatcaggatgtcgcggtcgtgaatcgcgacattccactcaatggcgtccccctgtaaatcgctaaagcggctatgcgtaatccgcgcgccatccatttggttatgaaatccctggcggagaatggcgtagttggcgtgggtaacggtgatgtcatcgataatgagattacgcatcacctgcggttccttaccaccgatgaaaatttgcgcgacggggccaaagccgctcatcgccacgcctttaatcacacagtccgacccgcgaacatccagcgtcacattgtgcagactgccgccctgctcccccaccacctgacacccgtcctgcaaaataaaccgtccccggccattcccacgcaccgcgccctgtacccgcagcgtttttcccgccggaatcgttatcgccgcattgatattttcacacacccatcctggcggtacgaccacggtctgtccgtcggcgaaggcctgtttgaacgaggcgataccgtcatccgccggataatccttaatatcgacggtctcgcgaggttcacgcgcctgtaccggcaaggcgcgcagaaaaggaagaacagcaagcgcagaacctgccgtcaggagggtacgtcgggagaatttagtcgcgggcataccacctcgtttatatcgtttgtagcaggctggctaactggcgattaatcgcctgctgattaaaatcttgcgccactttttcacgggcgcgcgtgatcaccgactccagcgtgtcgtggtcaatccggctgaactcagcgagtcgggccgccagcgcctgcgcatcgttttccggcaccagccagccggatttgccggcctccaccagttccggaataccgctatgcacggtagataccacgggaatccctaccgccatcgcctccatcagcgctaccggaataccttccatatcgccatccgtaccggtaatcgacggcagcaaaaaaacatcggcgtcatccagcatcgccttcacttcatggctcggtttaaaccccggcatctcaatgacatcctctagctgatactgctcgatgagcgtgcgcagccgacgttcccacgggccaatccccagaatgcggtagcgaaacgccacgccctgtgctttcagttgccgacaggcttcaatcgccacatgcaggccttttttttctgtcaggcgcgcgacggaaatcatctccagcggcatccctggcgctttcaccgaacgatgggtaaaacgcgtcatgtcgacgcccatgcgcgaaacggcaatcttttccggcggacagcccatacttttcaggcgaccggcccacagatcgctgatgggcagcatcagatcgccacgacgaaacaactgctgatactccggcgtgtaatgactgagcacctcacgactagagatatcaatcccgtggaaaatagtcgcgattttgccgcgaagcacgcccagttcgcgtagtttggccgccgtcacgcccgccggaccaaagtgtgcgataaacacatccgccacaaaaggctggctcacctgcgcgcaaatcgcggaaaggatcaaattgcgtgattcatcgccatagcgggtaaaattgagcgctttccaggtcgccgcccgatgcagccccggcagcgttttacatgcccggtagcgcagtttcgccagccgtccctggggctcatcctgtaaccagcgggttttcgccgccaggccatacttctcccaggcggcgtgagtatgttgggtatcgcctttttgtaacgcgacaatctccacctcatggcccatatcaataaacgcagtaatctgattcagcacaaaggtttccgatgagagtggaaatttcagcagaaaaaagctgactttcattgcgcctcccgaattctgtcgagaacagatttgatcatcgtgaaccctttcgcccgctcctcggtgacggcgttagccacttttgcctttagcgcaggcaattgattgagcgtatcggccaccacgctttgtaatgaaccgttcagcaagtgacggatatcgatggccaattccgccaggcctagctgctgcataatcccggcggatttatgttcataattaatggcgatggcgggtgtgccaaaattcatggagataatggcggaatgcaggcgcgtcccgatggtcagtacgcaggaggcgaggatctttccgatttccacgtcattgagttcgtccatcgcgatatggaaattctctgagtcgtttacatacttcgccatccgtaacgcaaccatccggtcatcgcggttatagcgatcgatactggtgcaggttgacagcgccagtacctgataaccgtccgcaatcaggcgattcacgacctgggcaaatgcctgctcataggcctgctgagtggtgcccaggcgtttatcaaacggctccagatcgcgcaacgtaatcgcgacggttttgcggcgcgcggtgacgtccagccagtgctgcacagcataactggcaacaaactcgtcgtgacggcgttcgactaaccaggcggtatccaccccctgctccactttccgggtatcgatctgcgcggcggtcatcagatcgcggctgacggtttcacgcaggatcagcgcactggtgcgcccaaaaacataattggcgagctggttaaagtcaggattctggaaagggccgacgctatgtcccaccatataaattggtttgttcgccataaacgcgcacagcggatattcaaagtgagtcaaaccgtataagtcgacatagtttgaaccgcccacctgaatgacggcgtcatactgcgcaataaattgcgcgaattcggcaaattccggcgcgatagcaaaattacgcagcgatccttcctgggcgactttagacaataaaattttatgctgaaaacgacggcgtaatacttttttcacccgaccgttaagccctgccgccgcctgctgtttctggcttaactgatacagcgggtcggcaataatcgggcgcccctgcaaccaggcggaactcaccgggaaacggctcatcacatccatctccgcctctggcgcctgttgacggatggcatcaagcaaaccgcgcataatggcgctatcaccacggttgccgcatgtgtggttgcctaaaattaataatttcataaatagcctcttatatccccgtcatccgacacgtaataactttttcatttttgcactgccaacaagctgatttttaatttccatcaccagcgcattgcgtgaaaaaataatcattaaaataaaactcaaaataccgaccataacctgtagcgcgaatacccccgacaacggtaaataaccgtcgaccagctttcctgcgccgtagctggtaataaatgttggcaatgagagataaaacggtagccacaggctgagaatatactgacgatagctggagccgagtaccggcttaatcatcacgaaatagctcagaatggtgttgatgatttgcaccaccaggaaccccagcgtcacgccaatcgcccccgccagatggccgccaatgagaattgccgggataaacagaaacgttttaaagacgttgaacttaaagctgatatccacgcgcgctttcgccatcagcagcgaaccaatcgggttgccgaccgagcgcaacagccccaccacgcacagcaattgcaggatcgggataatgctgttccacttctcgccaaacactaacggcacaaaattgttcgccactaccatcaggcccaacagcgcgggaaaattgataattcccaccacggaaagcaacttatagaagttgacgcgcagcttctcggtatcgtcctggattttggcgaatgccggaaatagcacgcgagtaatgatggggttaagcttcgccggcggcacaacagccacgttgtacgcgaggttatatcccccggcgacgcttgcgccgagaattctcgccagtaccagcgtcgataaattcgtgttgatgtaattgacgatactgtccgccgtcagccacgcgccaaaacgcaggttcgtggacaccgatgccagcgaaaaatgcagccccggacggtaaatcttgcggccaaagtaaccaaacagcagcgttcgcaccgcgctgttcaccagatagccgagaatcgcggttagcgccagcggccagtaatgggcgctaatcaccgtaaaggtgaaccccgccagcacggaggtcgtttcgatcatgccgatcttattgaactccagctctttttgcatcagagcgcggaactgctgcccgtgagggatcacgataaacgccagcgacaacgttttgattaacggcgcgagatccgggttatgcaaaacatgggcaatcgcatcgctcagccaaaagaccaccgcaaataccacaatcccaagcccaacgtttagccagtaaagcgtggtcagctccagatgcccaatcgttttacgctggataatcgagttcgcgatgccaaagtccgagatcgtgtcggccagcgcgataatcaccagcgagacggtcaacaggccaaactggtggttgtcgatgatccgcgccagcaccgtcatctgaattaaccccagaccgataatcactatcgtggcgatagccgaccatttagcgccgctgatcgttttttgtcgtaaactcattcttttctccagaacctgttcacaaggcatcattggcgcagccagattgaatacggacagcgcggaaaaaccggagcgtacacgctgccctggtgcaatatggcaagtaaaatagccttgtgggtcaggttcttaatacgccgctttattaacaaaccctttaaaaatcgtcagaaaaacgattttgatatcgaaccaaatactccattcgcggatgtattccaggtcgaattccacgcgtttttccattttctccagcgtatcggtctcaccgcgccagccattaatttgcgcccagccggtgatgcccggcttcatcttgtggcgtagcatgtaaccttcaatcaactgacgatactgttcgttgtgcgccaccgcgtgaggacgaggaccgacgatggacatcccgccagttaatacgttgataaactgcggcaattcatccagtgaggtacgacgcaaaaagttacctacccgggtgacgcgcggatcgttttgcgtcgcctgggtaacgaccttatcgttctccatcaccttcattgagcggaacttccagactttgatcggcttgccgtccatcccgtagcgcgtctgacggaaaatcaccggcccgggcgagctcaatttgaccgccagcgcaatgcagcacagtaccggtgagatgagcagcagaatcagcgacgccagcacgatatcttctgcccgtttaagcagacggttaatccctgatagcggcgtgtcatatagcggaacgaccggaacgccgctcatctcctccacgcgcgagtggagaatattaaaggtgaacacatcgggaataaggatcaccgagcaggtggtgtcggccagctcgcgcaccagttttttcaccatggcgccgtcgctcatcgacatggcgatataaacattgtgaattcgcgaggctttcgcatcgtcaattaactgctcgaagttcccggcccagtcagcagagacgccgcccggtttgggatcgtgatagacgcccaccacctcaaaacccagccacggctcattacggaagctatccagcaacgcctggcccgcaggcaaatctccggcgacggcgacccggcgagtgttataaccacgattgcgtagccagcccgcgccgaaacgaataaatgaacggcataacactaagcccaggctggacaacgcataccaggccagccaggtggcgaggcggttgtcaaagtcatcattaaacgccaccagaccggcgctgaagatcaggctcagcgtccagttttgcagtaacagcgttaactctgtcgacattttgacgccgcgccaggagcgataaaaatcggttatcccgcccagcatttgaaaaacaaccagcgtaatcagcgccaccaacaggtgcatgtacaggaatggcagtccactgacttcacagatgaaccacagcccgccaaacatgatggtgatatctgaaaagcgttgcaccatagagattaacgatgcattggttttggctcgttcgcgcttttttagatttgtcatcgttgttcctgtgattggccccttacccgcaggcggtaaggggagatctgacgttactgattcagcagcgccagcagagtgcgtgttcgcgcttccatcagcggaatatcgccgcgtgattccacattcaggcgcaccaccggttcggtgtttgacgagcgcaggttgaaacgccagtcggcgaacgacatgctgaggccgtccgtgcggtccactgcctgcgcctcttccgcaaagtgcgcttccacccgcgcaatggccgccgccggctccgccagtctgctgttgatttccccgctcgccgggaacgccgccatccggtcgcgaaccagctcacccagcgactgtctcttcaggcacaccagctccgccaccagcagccacgggatcatcccgctgtcgcagtaggcaaaatcacgaaaatagtgatgcgcgctcatttccccgccataaatggcatcctccgtacgcatccgctccttgataaaggcgtgcccggtttttgacatcaccggcgtcccgcccgccgccgtcaccactgcctccgtgttccaggtcaggcgcgggtcgtggataatcttcgcccccgggtgtttttccagaaatgcttccgccagcagcccgacgatgtagtacccctcgataaactgccctttctcatcgaacaggaagcagcggtcgaagtcgccgtcaaaggcgatacccatgtccgccccgtgttcaataacggccttgcgggtgtcgtcgcgacactccggcagcaacgggttgggaatgccgttcgggaaggtgccgtccggggtgttgtggattttgatgaactccaccggcgcgcccagcgccttcaggcgcgcttcgatggcgtcaatgaccggccccgccgccccattgccggcgttaaacaccagcttcagcggggtgagattgttaacactgatatagccgagcaggtggtcgatgtaggcgtcgcgcaggctgatttgtctgtagctgccgcgcgcggcctcgttcaccggcgggaagtcgcccgcttccgccagacgctgaacgtcgcgcagaccggtgtcgccgcttatcgggcgggcgccctcgcgcaccagcttcataccgttgtagtccatcggattatggctggcggtcacttcaataccgccgtccacgccaaggtggaaggtggcgaagtaaatctcttcggtgccggacataccgatatccagcacgtcgacgcccgcgtcctgtaaccctttcgccagcgccagcttcagcgcctcgctgatcaggcgcacgtcgccgcccagcacgacggttttcggttttaaatattcgccgtaagcgcggccaatccgccacgcgatatcttcattgagctcttcgcccagcctgccgcgaatgtcgtaggccttgaaacaggttaattttgtcatgtgcttccccttcttcaggcaacagttagccctgaccgtaaatggccagcatcgttattgttattcattgccggatggcgcgttgcgcttaccgggcataattgcaggcgtcagacccgcccgtaacgatcctcgaaccgcaccacgtcgtcctcttcgagatacgagccggaacgcacttcaattaaatcgagcggtatttttcccggattttccaggcagtgggtcgcccccagcggaatatagatggactcgttttcaccgagcagcttaacctcgccgttgatggtgactctggcggtccccgccaccaccacccagtgctcggcgcggtgatggtgcatctgcaccgacagtccttcccccggcttgacggtaatacgcttcacctgatagcgctcgcccgcgtcgatggagtcgtatttgccccacgggcggtaaacctcgcggtgcatgtggtgctcatggcgtccgtcggccttgatcttctccaccacctttttcacgtcctgcaccgcgtggcgatcggcaatcagcacggcgtctttggtctgcaccaccaccagatccttcacgccgacggtggtcaccaggccggattcggcgtaaacgtagctgttttccgttttatggctgatgacgtcgccgtggtggacgtttccctccggggtgtgggcgctgatttcccacagcgaggaccacgagccgacatcgctccagcccgcatccatcggcatcaccaccgcgtccgccgttcgctccatcaccgcgtagtcaatggactcttccggacaggcgaggaaggcctcttcatccacacgaatgaagtcaagatccggatcgacgccgcgcatcgcctgttcacaggcggccagaatatcggggcggaactttttcagctcttccagatagcgtccggcgcggaacagaaacatgccgctgttccagtagtaatcgccgctggcgacgtaggcctgagcggtttccagccccggcttctcaacgaactgcgccacctcaaaagccaccgcatccgtcgcgcccggcacgacatcaccgcgccggatatagccatagccggtttccggcagatccggcacgataccgaaggtcaccagtttgcccgcgtcggcatagggcatggcgccgcgcaccgcgtcgcggaaggcctcttcattggcgattgcatgatccgccgccagtaccagcatcagcggatcgcagtccgtatgctggcgcgtcgccgccagcgccgccagcgcaatcgccggcgcggtattgcgcccggcgggctcaagaataatgttctccgtcagcttattgagctggcggagctgttcggcaacgataaaacggtgctgttcgttacagatcaccagcgggctttcgcactccacgccgttcagacggcaaatggtggtttgcagcatggtgagatcgcctttcaggcacagaaactgttttggataaagcacgcgagaaagcggccacaatcggctaccggagccaccggccatcacaaccgggtaaagttttgtctgacgcattatcatccccgaatatctgcaataaattggcgtagcacgttctctttattgagcgtgcgttcggcgtattcacgtgccgtcgtgttgtttttcggcatggcgagcgcctggctaatcccgttgaccagcgcgtcggtcgactccggttccacgcaaacggcgatgcccggatagcgcgcgcaaagttgtcctaattcggtgtgcggctcagcggtaatcaccgcattaccgccgaccgccagaatgttagtcagcttggagggcagtaccgcatccgccgcgccgcgcttttgcaccaccagatggcagtcgcccattttcagcagcgcgggtaaggcgtcgtaaggctgcagcgggaggaatttaatatttgccaggccgcgttcgcgggccatgttctccagccgcgccttgccgcccccctggccgacaatcgcaaaaatcaacggtcgatcgcgtaatcgttccgcggcgtcaattaccttttccagcccttgcttttcgccgatattgccggaatagagcacaatttttttgccctctggcaagccaagctgctgacgcaaagccgtcacgtcagcgtcattaacgtcctgaaagcgcgccacttccgaccagttcggaaaaaagaggattttttccgccgcgacgcccttttcccgcgctttattcatcatggagcgagagatggtcgaaacattatcaacgttacgcagcgcgctgcgttcaaaggccgtcgctaaccgcgctacgctgccgcgcttgccttttcccgccattcctaagccgagcatggcgtccacttcgtaatcctgaatatgcagtacggtacgcgcgccggagagtgtcgccagcagacgcattcccggcgtacaaaagagcgtcggtacaacgccgataatccgatccggcttccagcgacgctgcgccatcagtgggaaaaaactgctcaatgcaaagctccccagatgaagcagtcgttttaaggtggagggctgtttcggcacatacagcgggcagcgccagacggtagcctcgccctcttcccggcgatagcgccaggcggaatagcgctcaccgaccttccactgcgggtagtacggcggcgcagtaatgacccgcacctcatggccttcctgcgccatccacgccaccatttcgccggtatatttgccgataccggtcagttccggcgaatagttaatgccatagaccaggatcttcataggcccaccgccggcgcgtcaggagagaagtaggcccgactgttctcatgaacattgtcgcttgccagaagctgttccggcgtcagccagcggtaactgccatgctgggcatcaggcaggcgtaaatcgctctccgccacgcgcagacgaaagccgagcacgatgtagtgagttgaaaaatcctcaccggaaaagttgtcgtcatagaagtgctgccagacgccataaaacgtccctgccgccagcggcagacgcacgcccagttccgcctgcgtcaggcgtgcaaaggcggcctccagcgtttcgtctttgcacacccgcccccccggcacaaaccagtagccctgcgccggacggttgagacgctggcccagtaaaatttccccctggccgttttccacgatgaaatcgagggagatgaggggcgtggcccgcaccacggcggcgaaatcttcctgacgtaaaaacattgtcacccccggaaccgttgctgattctcaaggaaccactggtaagtaccggcaagccctgcctccagtgaaatttcgtgataccagccaagctgatgcaggcgcgtgacgtcgagcaatttacgcggcgtgccgtccggcttcgcggcatcgaacaccacccggccctggtaacccaccacctttgcgatggtctgcgccagctcgcggatggtgcagtccacgccagtgccgacgttaatgtgcgacagcatcggggcagtgttctcctgccacacttcgcgcgccagctccatcacgtgaatactggccgccgccatatcgtcaacgtgcagaaattcacgcatcggcgtgccgctgccccacaccaccacctccggcgcgtggctctgcgcagcctcatgaaagcgacgcagcagcgccgggatcacatgtgaattgtccgggtggaaattatcatgcgggccgtacaggttggttggcatcaccgaacggtagtcgcgaccgtactgccggttgtaggactcgcacagtttaatcccggcgatcttggcgatggcgtacggctcgttggtcggctccagcgtcccctgcagcagctcgctttccgccatcggctgccttgccagtttcggatagatacaggacgaaccgagaaacagcagtttgttcacgttgtgcaggtgcgcggcgtgaataatgttgctctctatcatcatgttttcataaataaaatccgccggatacgtgttgttggcgacaatgccgcccactttcgccgccgccagataaacctggtcgatacccgccccggcaaagaacgcctgtaccgcgcgcccgtcgagcagatccagctcatcgcgggtgcgcagtaccagttccacgtcgccgcgctgcgcaagctgccgtacaatggcggagcccaccattccgcgatggcccgccacaaaaattcgttgcttattcattctcaggactccagcgcgatggccacctcataaccgtgagatttcaacagtgagtgttttttcgcggcctccagatcgttcgccaccatctcggagaccatctccgacagggtgatttccggtttccagcccagtttctcatgcgctttggacgggtcgcccagcagggtttccacttccgccggacggaaataacgcggatcaacggccacaatcacatcccccggtttcacgcccggcgcatcgtgtccggtaacggataccacgatccctttctcattaatgccttcgccttcaaagcgcagttttatccccagttgcgccgctgccagctccacaaactggcgtacggaatactgcacgccggtggcaatcacgaaatcttccggctgctcctgctgtaacatcatccactgcatccgcacgtaatctttcgcatgaccccagtcgcgcagcgagtccatgttgccgagatacaggcaggactctagtccctgggcgatattggcgatggcgcgggtgatcttacgggtgacgaaggtttcgccgcgacgcggggactcgtggttaaacagaatgccgttacaggcgtaaataccgtaggattcacggtagttaacggtgatccagtaggcgtacagtttcgccaccgcatagggggaacgcgggtagaacggcgtggtctctttctgcgggatctcctgcaccagcccgtacagttcagaggtggaggcctggtagaaccgcgttttcttttcaagaccgaggaagcggatcgcctccagcaggcgcagcgtgcccatcgcatccacatcggcggtatattccggcgactcaaacgacaccgccacatggctcatcgcgcccaggttgtagacctcatccggctgcacttcctgtaaaatgcgggtcaggttggaggcgtcggtcaggtcgccataatgcagatgaaatttcgggttgcagctgtgcgggtcctgataaatatggtccacgcgctcggtattaaacgatgacgcgcggcgcttgataccatgcacctcataccctttttccagcagaaattctgccaggtaagacccatcctgtccggttacgccagtaatgagagcgacttttgacattttcatttcctcaaatagtcccgttagggagtaactttctgaacgcgctggcgcgttaccactgcgggattgccccgacaaatcgcatttgccggtaatgatttaaatacgctgctgcgcgcgccgacgacggtgccatgacctatcgtcacgccgggcgcgacaaaaacatcggtcgccagccaacatttttcgccaataacaatcggcgcggcattaatatcgaaatgggcgctggtataatcatggctaccggtacacaaataccctttttgtgaaataaccgcatgtgcgccaatattaatttcacccaacgtatataacacagcgtcgtcgcctacccaggcataatcgccgacggttaatttccacggataggtaatttttactgacggtcgaataaccacattctttccaattttggcgccaaacagacgcagcaaaaaggctcgccagcgatacaatatttgcggcgacccggcgaataatgtcgcctgtaccgcccaccataattgtacttttagcgcattagcgccgcggaaccccttcggcaccgtaaagccgctaagatcctgcataataactcccggtgattagactttgttataccgcgcttttgttttacccgtcgttttcagacgtaataaataggataattgcgcccaaaatcctggcacacgtaatatttttcgctgtacgttttttgcatcctgacataattccagattattcgaggttgacacgccgcccattgaaaattcagataccagtccgttaattcgccgaaaaggatagcctgctttatagagacgggccgccagcgcataatctgaagagacatgatattgcagatcataaggatacttttttaacgctgccgtcgggaaaaatatcgcctgatggctggctggcaaactatggtagatataatacccgggtttagccttccggcgtattttatgcccgccgccaaaatccagcagcgcgtcgccaatatacatcgcctcgcccttttgtcgcgccagttggcggacaaacagcgcggcatcatcatggaacgcatcaccggaattaagaaacagggtatagcgcccctgcgccaaggcaatgcctttgttcatggcatcataaataccgcgatccttttcactgataaaacgcaggttaaactcaccgtgacgtttttgcagaaattcgcgcgtgccgtcctccgaaccgccatccactacgatccattcaaatgacagacccggatcgcgcgccagattgcgcagcgagcgccaggtttttaccaccccttcgtaattgcgaaaggcgacggtaacgacgcttaaaaacatgcaaccaccccgttatgaaatttttaacgccttgcgcaaaatgaacggacagacgattaaaaaagcatattccgggctaaatattgaaccggtaaaaaacagcgacaccggcgtaaaaagatagagctgcacccgaaaattgcgattatcgccaaacgcatttagcgccatttttaaaactttccccatataccacagcgtcattagcactgcgaaccaggaaaaataaataatcagtagatacaatccattgtctatggttttcccgacatccgcaccgttaaagattccgaatgatgcaacatattcataaagtgagccaaatctgactacaccatcaatatgggtcaaggaatatccgaccatgactaaggggcccacaatacgataataagaagatgagccttccgtccctaaatcgccaagtcgtgtcgcgatataaggaaatgcaataattaccccaaccaaaaacagggttaatgagaccagcgccagtggaagttttttctttatcgcatccttattcaaatattggaacgcccactccagaaggtaaaacaggataaaggtcattacccctgaaaatgatcctgataatattatccctgccagaatcatagcatcgcttttcggtgttttgataccaaactgtttgatgctcagccaaattgagattagtgccaaagcgaaaaatgccggttcaaaataaagcgcagtggtacgcttaccgccaaattttatgaagttcagtacgtagctattactgtaaatgagatatttcgaaattccttccataatactgctgccgccggtaaggataatttgcgccatctccaccgcggcgagcgcgaccaccatacccaccaccagataaaaaaaacgcaaaatctttcggtggttatgcgcggaaatggttttgaatcggatactccagaccatcccgataatgaccacaatatagacaaacagcatcgtggacgtgacatatttaccggcattcagcgactggccgaacaggaagttaaatgccgtaagccccgcgccgatgcctaaggcgatcatcaatttttttacgctaatgcgttccacaaataacagcagcaacagcggtaaaaaagtgacgatggtaatgggaaagctttcccccagttgggcaatcttgacattgaccagtaggtagatcagcggcagcagcagatagctacagattctgatagaacgagacatactcctccagcatctgttgaccgctgtacgcgacgcggctacgcatacgaaaggcgtccagcgtggcgccaaataccgcctgagcaatctctggcttacgccgctgcgccaggcgcagtacatctgtagcggcaaaagtctggccgccggatttcgccagcacctcctgcgccgcctcgctgtgggtggcgattaccggtacgccgatcgagagcgcttcacacaagatcagcggatagttatcgacccgcgagctaaagaccagcgcatccatctcattgagcgcgctcattaatttgcgcttatcggtttcaaaaccgtgattaacaacgttttggccggtaaaaggcgaaaatttaccgaaggtatgcagttcaattttttcgcccagcgccatcatgtcgtgtaccagacgctggtcagttttgccgtcataacgcaagtcatgcgccacaatggcaattcgcggttttcccggattcagcggcacaggtgatagctgcgcgagaatcgcctcggtcgccagatcgataccgttgttaataatctggcagcgccccgcgccataaacgctgttaaaggcctcggccacgtgctggctcggcgaaataaaccggcagcccagccgcagcatgtcccgaaagcgctgacgtttgccgtcaataagctggtgcgcccgatccaccctaaccggcggataattgcttagggtcgggcatttttggcagccgcttttccagccctcgcaaccgtcggtgaaggcgcaacgcccggtgacgctccagtgatcgtgcaacgtccagaccagcgtgacgtctggtttttgcgctttgactttttcgcaaaacgtcacgatgtccgccaggtttagccagtaactgtggagaacatgaaaatgcagcaccagcgggccggatgtctggataaccgtgcggtaaagattgtcgagattgccaaacagatcgcgattcaggaaacgaaacagcgcgatattagcgattgccgtgccgcgcggcgtctgttttatcacctgcggataacggtggtggctgacgcttttttttccgcctttgccataaccataaacaaaatgcgacgtcagccctttttgcagcgcccgcagatggagatccaacgccactcccgccgcgccgccttccgccagccgtacattaaattgcagaatattcatgtgctgaccttcacccgtgctttttctcccaccaccagcgcatgatccggaatactgtcaagcaccacgctacccgcgccaatcgtgacgtgattaccgatagtaatatcgccaagcaggatgacattcgcccccagctcaacgccgttaccaatcaccggacaagccaggctgtccgcgccgcgattgccaatggtgacgccgtggcgaatggtaaaatcgtcgccggcgacgacatgtttgttgatcactaccgcgtaaccatgatggatagtgaaccgccgaccaatggtcgcggcggcctggatttcatacccgaacaggcattccgtgatcacgcgatacagcaccagcaccggcgcggcccacagattattcagcacattctttttgcgccagacggaacaaaaatgagcgatacggtaggccagcaccatgcaacaggggcgtaagctccagctattcgcgcgtaagtcttccagcatcgttatcgcccccgcagcccggccgccagacgtttgctattacgcacggagagcaacgtcagcaacgtgcgccaggtcattcgcttattgcgaatttggtacagggtaaaaagctggtattttttactggcgcgatcgaatttatctttgtgcttacgataaaaatggaaatagccggagaactttttcggcgaagaggtaatctgcatctcgccgtggttgatatgtaaaatttgcgtcgcctcttcgactttccacggttcgccatactccaccaccatgcgcagaaaaatgtcgtagtcctgcgccgccttgagttcggtatcgaacaaacacgctttaaaacgccaggcccaggtaaaaacctgattgccaataatattgcgcttgtagaataagcggcgcgaataaggggatttcggatacagcggcaggctggcaggctgagagtagacctcgccctcgcacacatagtcgttggcatacaaaaaggcgtgcgtagtcaactggtgtttatgggccagaaacacgctcagacggtttggcgtccattcatcgtcatcatcaataccggtaatgtagtgcccttgcgcctgcataatggcctggttgcgaaccgcgcaggcgccggtattcctggcgttatgggtataacggacgcgcgggtcgttcagctcctcaacaaattgttgtagctgctgataagatgaagagcaatcatccacgatgatcatctcccagtgacggtagtcctgacgtagtactgatttaatcgcccggatagccaactgctgcctgttccaggttggcatataaattgagatcagcggattgtctgttgtcatgcttattccccagatagttttgccgcatggcgctacgcttgtccggcctacagtctcaggccgcgccatccggcacgccttattttttatttggaatctgactggtattcatactcgtaatagccataatcctggtagcccgtcgcccggcggaaaatggagttgagaatgacgcctttgacctgaatgccattctggtcaaaacggctcagactggtttccacctcttttaaggtgttgacggcataacgcgccaccatcagcgtcgtcccggcgtggcgacccacaatcgcggcgtccgtcacggccagaatcggcggcgtgtcgattaataccagatcgtagcggctgcttgcccaggcgatcagctcgccgaagcgctcgctcatcagcagttccgatggattaggcggcacctgaccgcgcggaataagatcaaaattagcgatcgccgtgggtttcgcgcaggaggctatctcgcctttgcccgccagaatgtcagataagccgtccacgttattggtgccgagcagttcatgggtgtagcccttacgcatatcgcagtcgatcagtaatacccgtttatgcgtctggctgatgacggccgccaggttggcgcaaacaaaggttttgccgatagagggactgacgcctgtgagcatgagtacattattttgcgcctgcatcatggcgaaatgcaggctggtgcgcaggctgcgaatcgcctcaatcgccagatcggtcggattgcccaccgccagcagttggctctgcttgtaacgcttaattcctttaatggttttgacgctatcgcgcgctttttgccattccgacagcggaatactggcatagacgctgatcccgtgctcctccagcgcctgcgggctttcgataccgcgattaaacagcgagcgcagcagcacgccgacaatcgataacattaatcccagaataatgctgccgagaataatcaacgcctttttcggcttcagcacgcccggctgggtaatcgccgggtcaacgatgcgcacgtcgccaacggtgctggcttcggtgattttcagctcctgctgtttattaagcagttgcatatagacctgctggccggactccacatcgcgggtcaaacgcacaatctcctgctgggttttcggcattgccgtcacccgcccgttcagtttggctttttcatcttccagcgctttacgtttttccagcagggtgcggtaagccggatgcgctttggtaaagagcttggaaatttccgcctctttaaacgtcaactcattcaactgggcgtcgatattaaccatcgaatcgagcaccgccttcgcctccagcggtaaatccaccgagtctttatcctggcggaaagcgtttagcttgttttccgccacatccagacggctgcggacttccggcagttgttttgccagaaacgccaggctcttccccgcctcttcagatttccgcgcaatatcctgttgcagatagttacgggtaatactgttgagaatttcgcggatctggtcgcgatcctctcccgtgaacgtcaggctcagaacgccggtatctttgccggtttccgttacggtgaggttattttgcaggttattaatcatgccaagcgttgagaatttactcaccgtaaattctgtatcaggacgggcgtcaatcgcctctacccgcatcgtcacgccgtctttattgagtggctggcccacaacgccctgcgcgctaaatccgccgtcgctaaccaactgataacgtttgtcgcccagcactttgagggtgaagatctgtccgctcatcgtctctggtcgggtgaatgtcgtgactttcaccatttcattgtgacgtcccatcagccgttcccacccggcgccgaacagcggaaaggtgtttttggtgacggcaatatccagatccagatcgtcaacggtcttccccagcaccaggcgcgatcgaatgagctgaatttccgcatcggaagccggcggcttattcgctaatgcgctattgatatcctgtaccagcgaattaccggcgttttgttcaatctgtaccagcgcatcggcgctatagatgggcgtggcgaagaacgtataaattaccgcgcacagcgcaaatatggccgtcgtccccaacacccaccaacgcgcttcaatcaccgttccgaccaggcgcccgatatcgatttcatcgctacccgtaaccgccgcagattgttttgctttttctgtcatggttttccctgctctgcattcagtgcctgcgcccactggcgggcagacctttccagtaatgtgtacaccgcctcaaacgcatcgcggcttttgcgatacgggtccggtatttcacgctcgctgtcccagtgaccaaacagcattaccttgccgcgcatttccggcgcaatgtcgcacagggcggcgatgtgacgtttctccatcgtcagaatcaggtcatattcccggcacagacgcgcggaaatttgccttgcgcagtgattttccaaagacagatcgtgggcgctcgccacgctcgccgccgcaggatcggcgcctttgccgaccagtgcgcctaatcctgcggacgcaaccgtcagcgagggatgaaagcgttttagcaaacgttccgccgtcggggaacggcaaacattccccacacagaccactaagattttgttaaacataacgattaccaggaatgaatgtcgctggccgtatccgtcatataacggacaccgctaatggttggcagcaactgattgatcagacggttccagcgagcaaccggcgcggtcgtgacgtacaccacatcgtaaggctgaagtcggaattccgtcgccatcaccaatgacgtggcgtcagacatatcaagctggtagatattggcgatcttgccgccgcgtcccccctcgcctttcaacggacgaatcacaaaaatgccgctggcgttggaggtggtcagatcaatgccttccgcattgcctaatgcttcggtgagcgtcatgccgctgaaatccattttgagggtgctctgttttttcacttcgcccatgacaaagactttcagatcgtcattgcgcggcacatacagaatgtcgccagggtagagcaagcggttctggctaagatcgccattttgcatcagcgcctgtagcgaaatgcgctgttctttgccgttgtgcgtcaacacgacgttgcgccagtccgccatatcggtcaggccgcccgcagcgttaatcgcatccaggacggttagcggtacgttagtaatagcctgctgaccggatttattcacctggccggagatgtacgctttttgcgagcggaaagcggcgatattgacatccacctgcgggtccgcaatgtacttcgctaaacgcccggtaatatcgctacgaatctctgacaaagttttaccgacgacgctaaccttgccaatgtagggataaaacatggtgccgtccggctgtacccagttgccggtatcgcttgagctacggtactggcctgctggcgtggtcaattccgggtgatcccagacggtgacattcagcacatcgccaggcccgacgcgatactgatagctggcgatctcctggtccagcgacatattcggttgcgcgacattgggccgcgggcgtaattgctcaaccaaccgtggcgtcagcggatacacattgaccatccggtcgagatcaaagtcagcgtcttgctgtttgatcacatctttccccatcgtagacatattgctgcccggaagtactgtgcaaccacttatcaagctgagcgacgccaataatggcatcaatttcattttggatttcatcattgattatttatcactttggcagagtcattatcctgtgcaatttaaatagcggcttcgtccgtgcacatttaccttgcagttaatagcagagaaaattaactggcatcattctgaaaaaaaatcaattcatccgcaggctattgacagaataataaaggcttatattcaggctttcaggcacgctaccgcccctggcttcttagctaccaatacactgattattctaaattttcgcattcccctcagattttatcctcgttcagataaaaatcttcagcgaaataaaggttacgtattaatagttttctcgatgtcgtgacaggatatttaagcgcgctatcttaatcctgcaagaattgttgcagctaacctaatgacaggcaaggtaacaaacccgccattctatatttttaagattaatattaaatgaattaacagatgattttaggattttattgatgttgacaatatttatttactccactccacctgcgatatttcctaaatatattcttgacattatttagtttctgacagaaacattacggctattttaaagttattttatagccgcgtaacaaagataaattgcgctgcggcattgcatttttccgccgtattatccatgatcgaattgtgacaattgtcatattacagaaggtattgctcttactatggaatggattgccgatccgtcaatctgggccggactggtaacgttaatcgttatcgaacttgttctcggcattgataacctggtctttattgccatcctcgctgaaaaactaccgccggggcagcgcgaccgcgcgcgcattaccggcctgatactggcgatgatcatgcgcctgctgctgctggcgtcaatctcgtggctggtcaccttgactaagccgctttttagcgtacaggcgttaagctttagcgcccgcgatctgattatgctgttcggcggcttcttcctgctctttaaagccaccatggagctcaacgaacggctggaagggaaagatagcgccaaccctacccagcgtaagggggcgaaattctgggcggtggtcgcgcaaatcgtggtgctggacgctatcttttctctcgactccgtgattaccgccgtggggatggtcgatcacctggcggtcatgatggcggccgtgataatcgccattagcctgatgctgctcgccagcaagtcactgacccgatttgtgaacaaccatcccaccattgtcattttgtgtcttagcttcctgctaatgatcggctttagcctggtggcggaagggtttggtttccacattccgaaagggtatctgtacgcggctatcggcttctcggtgatgatcgaggcgctcaaccaactggctatttttaaccgccgccgttttctttccgctaaccatacgctgcgccagcgcacaacggaggccgtgatgcggctgattagcggtaaaaaagaggatgccgaactggatgcggaaaccgccgcgatgctggcagaccatgacgacagccagatttttaatccgcaggagcgcaggatgattgagcgggtgctgaatctcaaccagcgcaccgtaagtagcatcatgacgtcgcgtcacgatatcgagcatatcgatctcaacgcgccggaagcggaaatccgcgctctgctggaaaagaaccagcatacgcgtctggtcgtgacgggtgaaaatgaacaggaagatttactcggcgtcgtccacgtcatcgatctgttgcaacaatcgctgcgcggcgaaccgctcaacctgcgggcgctgattcgccaaccgctggttttcccggaaacattgccgctgctgcctgcgctggagcagttccgtaacgccagaacccattttgcctttgtcgtagatgagtttggctcggttgaaggcattgtgacattaagcgatgtcatggagactattgccggtaatctgccgaatgaagtcgaggaaattgacgcccgccacgatattcagaagaacccggacggttcctggacagcaaacggccatatgccgctggaggatttggtgcagtacgtgccgctaccgctggatgaaaaacgggaataccatacgattgccggattattgatggaatatttgcaacgcataccgcaaaccggtgaagaggttcaggtgggcgattatttgctgaaaacattgcaggtagaaagccatcgagtgcagaaagtgcagttaattccgctgcataacggcgagccagaccaggagatgtaacgtctgttcgcctgccccggcctgcttaccaggcaggccggaggcgcgttagcctcgccatccggctctgccctttggccaaaaactacagcttattcagcagcttcttcacatctttaccgttgcgggtatctttattgcgatccgcccagtcattgagccgacgcttcgcctcatcctgtaaatgcttacgcaataactgatccacttgcagggtatagttcagctcctgccacttgccatagacgcgcaacggcaccggcgtctctttcaggaaggtgatcaggttgctatcgccgttccagccgcccagcacacgcagattaaattgtgtatcacagctctgcttaaccagatccagcgttccgctgccggttaacgccagcatagaagattgcccgaccatgtcgtcgagcgtcagcgtgcccttatttagcgtcagatcggtcgtgaagcgatccagtcgggtcgcgttgtccatattttcctgcgactgctgcgcgtcgccgccgcttcgctctacggcctgctgcaccagttgctggaaattcattccttcaaggcgcgtattgctcatgtcaacatgcgcttttcctttccagctatggcgaaatgcctctgcgtcaatatccgccccggagaaatcgccaaccagcgacatcttaccggtcaggctaatcggataattgaaggctttcaggatagtcccaatctcaacatggttgaggcgagggtggaattcgatgcgcggactggcggtgcgggcgtccagcgtgccgggcagcgacatctctccgtcggccagtttcccctgcaaatcagtaatatccagcaatccggcctgattagacatcttcgtcgaaacctgggtaaagtccattccccgccagcgaactgaatccgcctgtaaagcaatctccgccgtaaagctttgcagcccctgataaggcggcgcaccaacacgcgacgcgataactggcctggtcagggggagcgtattttgcccctgcgacaccgcgccgcctgtctgagccacggcgctatgatgcggcaacaggttgtccagattaagcttgctggactggaggtcaatttgccattccggctgctccgccagcgttacctgaacttgcccggtcagagaactgtcattcgccgttaaatttaagtggttaaatgaaagacgtttttgcgcctcctgccactgcgcctgcaattgtccctgcccctcaatcccctgcgctggtagatccgcgccctgcaattgccagcgcagttgctcaatacccgcggttaaattatgcgggtaatcggaagcatccaccgttccgctgaacgataaagcaagatcccgctgatcgcggttcacgcgtcccgaaaaatcaaacgtgccgcgatgctcggcatcttgttccatattcagacgaatatcgcgcaccgtgacctgatcatcattttcatgctggaaaaccagcacgctgtcggcaacgcgcaggctacgaatatcaaacgaccagccgcgatcttccgctacgtccggcaaggtattatctttcggcgcgaccggcgcatcatcgctgcgtaccgcttccgtttgcggcgtcagttgaatcaccccgcctttcagcatcacctgcttaacatgaagctgatgactcaatagcggccataaagcaacatccaggcgcatattgtcagcccgcaccagcggttcgctggcgcctcgcgccgttagcgtcattcgcccggaaaggatactcagttgcggccatacgtgccagcgcagcggcccgtcaagttgcaactgatattcactacgcgcggcaacctgctgcaccatataggcgcggaaatcattcggattgaccaacaataccaacgcagagaatccggccaccagcacgaccaggagaatcatcagcgtcgtcagaaatcgtctcatgctaccctcaatggaccggcagtattgcgccgaatggctcagtctttatcaatccggctggcgacagcgccctgctgatcgcgatatttggcatcctgacggcggttataaggccgcgccgccgggccggacagcggctcaaaactcagcgcgccgatgagcatacccggacgcaacgccagcggcagcttcccggagttgtaaaactcaagcacaatgcagcccgaccagccgggatcgatacggtgcgccgtcacatgcaccatcagccccagacgcgccagcgaggagcgaccatccagccagcccactaaatccggcggcagggtaacggattcaaaggtaacggccagcgccaactcgcccggatgcagataaaatgcctcgccgtccggcaaaacgatttcatcgctcatcacgcgatccagcgccgcgctgacctcatctttaggcccgctcagatcgataaacgccgccgtatggccacggaaggttcgaaatttattgccaagacgtacatcgaccgtcgcgccgttaatgcgctctacgggaggtcgcggggtgatagacaaacggccttcatccagccaggcttcaatatctcggtcgcataaacgcatggcactttctcctttcgcgcatcaagcccttaaatcaagcacatcaagggctaaccaggttatcactgaacggtacacaattcgccagatttattcaaagaactggctgattttcgctttcagaatatcaatagcgatgcggtttttaccgccgcgcggcacgataatatccgcatattgtttggaaggctcaataaattgcaggaacatcggacgcaccgttttctgatattgcgccatcaccgaatccattgagcgaccacgctcgttcacatcgcgtttgatacggcgcatcaaacagatatccagcggcgtatcgacaaaaatagagaagttcatctcttcacgcaaacgcgcgtcggtcagtaacagaataccttcaagaataatcactttcttcggttctacgcgaaccgtttcctgcatacgggtatgctcaacataactgtataccggtaattcaatcgccgaaccgcgcttgagcgcctgaagatgctgaaatagcaggctgtgatccatcgcattcggatggtcatagttagtttttacgcgttcttccatcgacagatggctttgatctttgtaataactgtcttcgggaataacgccaatatgttcgtcacccacttgttcacgcaattcgcggtaaagggtactggcaataagactcttgccggaagccgatgcgccagcgataccgataatgacgcactgatgagactgatcagtcataaatttagcgacctgattaacctggatgtaaggaaggggggcgccgaaacgccaaacgcggcaattatagggatttcagcagcgcgataccagtccggcgctatgccacggtgaatttgttggcggcgcattcgacgtcgcgacgtaaaagcgttcagttttaacgcgggcagcggttttatcgacccgtctggaggaggaatacgccgggagccacaatttatattcagccagcgtataaatcattacgcgtttatactagcataatcacagagtaaactgacgcgtccggtattccgcgacgttaccggcgattcggatagagtggtaatgagtaaaccatcccaacatgttttcgttaccgtcccccacccgctattgcgtctggtcagtttaggcctggtcgcgtttgtctttacgctcttttcgctcgtattatcgcgtgtcggcacccaactcgcgccgctgtggttccccacctccattatgatggtcgcgttttaccgccatgcgggccgtctgtggccagggatcgcggtcgcctgctcgctcggcagcatcggcgcctcactgactttatttcctgccgcctcgcttaactttagctggacggcaataaatattatcgaggcggccactggcgcgatactgctgcgaaaactgctccccagctacaaccccttacaaaatttgaatgactggtttcgtctggctatcggcagcgccgtgattccgccgctactcggcggcctgttattttggctaatagcgccggaagcggtcgcctcgaaagcgtttctgatttgggtattatcggaagccatcggcgcgctgacgctggtgccgttaggtttactgtttaaaccacactatctgttgcgtcatcgcgacccgcatctgttgctggaaacgctattgacgctggtcattacgctggcgctaagctggctcgctatgcgctatattccgtggccgtttacgtgcgttatcgtcctgttgatgtggagtgcggtgcgcctgccgcgaatggaggcgtttttaatttttttagctaccgttatcgtggtctcgctcatgctggccaatgaccccacgctgctcgccacgccgaaaaccgacgtgatggtcaatatgccgtggctgccttttttaatgatcctgctgcctgccaatatgatgacgatggtgatgtacgcgtttcgcacggagcgtaaacatatcaccgagagcgaatcccgctttcgcaacgcgatggagtattccgccattggtatggcgctggtcggtacggagggtcagtggctacaggtcaataaatctctgagccattttcttggctatagccaggatgaattacgcacgatgacatttcagcaattgacctggccggaagacctgaataacgaccttgaacagctaaacatgctggtgcgcggcgacatcaacagctattccatggaaaaacgctactacacccgcaacggcgatgtcgtctgggcgctgctggccgtctcactggttcgtcataaagacaataaacctctctattttattgctcagattgaagacattaacgatctcaagcaaagcgagcaggaaaaccagcggttgatggagcgtattacacaggcgaacgaggcgctgtttcaggaaaaagaacggttgcacatcacgcttgactctatcggagaagcggtggtgtgtattgatgtcgcgatgaatatcacctttatgaacccgatcgccgagaagatgagcggctggcggcaagaggatgctttaggcacgccattattaacggttctgcgcattacgtcaggtgataaggggccgctgctggaggatatttatcgcgccgacaggtcgcgatcggacatggaacaggagatagtgctccattgtcataacggcggcagctacgatattcattacagtatcacgccgctcagtacgcttgatggcgataagattggttcggttctggttatccaggacgttaccgaatcacgaaaaatgttacgccagctcagctacagcgcaacgcatgacgccctcacccaacttgccaaccgcgccagttttgaaaaacagcttcaacagcgcctgcaaacaatacaggaatcgcctcaacatcatgcgctggtgtttatcgatctggaccgttttaaagcggttaacgacagcgcgggacatgccgccggcgatgccttattgcgtgagctcgcgtcactgatgctcagtatgcttcgatccggcgatctcctggcccgtctgggtggcgatgagtttggcctgttgctgccggattgtaatagtgacagcgcgcgctttatcgcgacgcggcttatcaacgccattaatgagtatcactttatgtgggaaggacgcctgcatcggatcggcgccagcgccgggatcacaatgataaatgaacataactgccagctcacagaggtcgtgtctcaggccgatattgcctgctacgccgcgaaaaatagcggtcgaggccgtctgaccgtgtacgaaccgcagcacgcattaacctcctcaaagagaatgatgccgctggaagaacagtggcatatgattaaaaataaccacctgctgatgcttgccagaaacgtcgcgccgccgcgtacgccggaggccaccagcttttggctggtctcactcaggctgtggaccagcgaaggggaagtgatggaagagcgcgcgttccgggcagggttagccgactccgcgctgcatcacgcgcttgaccgacgggtattccatgagtttttccaccatgcggcgaccgccgtcgccagcaagggattaagcgttgcgctgccgctgtccgccgcgggattatacagcgcgacccttattgatgagctgctggaacaactggagcatagtccactgccgccacggttattacacctgattatcccggctgacgttatcgttaagcaggcgcagaccgccgctgcgactctgcgaaaactgcggcaacgcggctgccaggtgattctcagccatgtcgggcgcgatttacagctgtttaatttactgcccctgcatatcgtcgattatttactgctggatagcgaccttatcgccaacgttcatgaaagtttaatggatgaaatgctgacctcgatcatccagggacacgcccagcatctggacatcaaaacgctcgccgggccggtacaaaacccacaggtgctggatacgctctcccgtattggcgtggatctgatttatggcgacactatcgccgaagcgcaaccgctggatttgttactgaataccagctatttcgctatccattgacggttgccagccgtgggtataccagatatgcagtagcgcgtaggaacgccacggtttccagcgctccgcgtagcgacggatctgcgcgggcgtcatcccggcgaagcgctgcttaattaagtaatcatcgggcaaaaagatatcttttgcctgccaaccgcgcagggcgaaatagttcgccgtccagcggccaattcccggaaacgtttgtaaatttttaacgctctgctcaatatccggcggcgcggcgagcgccagttttcccgccagcgtcgcctgcgccagatgaatcagcgcttcggcgcgccgcagcggcatccccagagctttaagcgccagcggatcggccaacgccagcgtttccggaccgggaaaacagacataatcgggcgcatccggcaacgcctcgccatagcggcgcgccactttcgccgtcaaccttgccgccatcgcgacactcaccagttgccccagtatcgcccgcacgccctgttcaaacgtatcaaccgatcccggtaaacgcagccccggtctgtcctcgcccagtggccccagcacggcggcaacctgcgcgggctggcagtcaagatcaaacagacgcgaaactttcgccagacacgccggcgcgacgggaagtaatccggcgctcacgctaacctgcacagtgtgggtgggcagatggggcctcacgctgaccagtccgcgatgctcgcccaccaccaggctgcgcgcataaaagccctcgcctactgtttccacgccgtccaccgcacgcgcggcaagaaagcccaacatccacgaccagtcgtaaggcggctgccagctcagggtaaacatacttttctcctttatttgacctttcagcataaacgctaatcgcacgtaacgccttgctttcatattccagttgtcgccgcgacgacatttcgctaaagtcacgccccttcttcactggcatggggattttaaggtgtttatcggatttgattacggtacggcaaactgctcggtcgccattatgcgcgacgggcatccacagttgctgacaatggagaataacagcgcattactgccgtctatgctgtgcgcgccgacgcgcgaagcggtgagcgagtggctgtatcgccatcatgatgtgccggcaacggacgaagaaacccaggcgctgctacgccgcgcgatacgctacaaccgcgaggaagatattgaggttggcgcgcaaagcgtacagtttggtctggcgtcgctggcgcactatattgacgatccccaggaggtctggtttgtcaaatcgccgaaatcctttttaggcgccagcggcctgaaaccgcagcaggtcgcgctgtttgaagatttagtctgcgccatgatggtacatattcgtcatacggcgcacagccaattgccggaggccattacccaggcagtgatcggtcgcccgatcaactttcagggactgggcggcgatgacgcgaaccgccaggcgcagggtattctggagcgggcggcaaaacgcgccggttttcaggaggtggtattccagtacgaaccggttgcggcgggcctggactacgaggctacgctgcgggaagagaagcgtgtgctggtcgtggatattggcggcggcaccaccgactgctccatgctgctgatggggccgcagtggcgtcagcgcgccgatcgtgaaaacagcctgttggggcacagcggttgccgcgtgggcggaaacgatctggatatcgcgctggcctttaaaaatctgatgcctttgctgggcatgggcggcgaaaccgaaaaaggtatcgccctgccggtgctgccgtggtggaacgccgtcgcgattaacgacgtcccggcgcaaagcgatttttacagtagcgcgaatggtcgtctgttgaacgatttggttcgcaacgcgcgtgaagcagacaaggtcgcgttgctgctcaaggtctggcgtcagcggcttagctaccgcctggtacgctgcgcggaagagagcaaaatcgccctttccggccaggcggatgttacggcgaggctgccatttatcagcgacgacctggcggtcgctatcagccagcaaggactggaagcggcgctggatcaaccgctgacgcgcattctggaacaggtgcaactggcgctggacagcgcgcaggaaaaaccggatgtcatctatctgaccggcggcagcgcccgttcgccattgattaaaaaagcgctttccgaacagttaccgggcatacccgtcgctggcggcgatgatttcggctccgtcaccgcaggactggcgcgctgggcggaggtcgttttccgctaagcgcctcgcaagcccagcgctgatggattgacattattcttgatgtggcttaacgtcaggagtgagggtaagggaggattcctcctccccctggtgtcttagtaagctggtaggctaatcactaagagtatcaccagtatgatgactaccttcatcataaccctttccttattttggccccttcctcgggaggggctttcccgtttcagcgtcctgctgaaatcggtggcttaccttcattgccgtgccgccactttaccgcactccggcgcgttaacgattttcaccgatgagagttgcgtagcgcctcgcaaagcgggtcgccattcagaataatcccgaccgtgttccataattcctccatttttctcccttccctgctgactacaatagaggaagcaacattccgcaaaacgtttcaggatgagaaacttataccgatgaaaggcagtaatactttccgctgggcaatagcgattggggttgtagtggccgccgccgcattctggttctggcatagccgtagcgaaagcccgaccgccgcgccaggcgtcgccgcgcaagcgccgcataccgcctccgcaggtcgccgcggtatgcgcgacggccctctggcgccggtacaggccgcgaccgcgaccacgcaggccgtaccgcgctatctgagcgggctgggtaccgtgaccgccgcgaataccgttacggtgcgtagccgcgtggatggtcaactcatcgccctgcactttcaggaaggtcagcaggtcaacgcaggcgatctgctggcgcaaatcgatcccagccagtttaaggtcgccctggcgcaggctcagggacagttggcgaaagataacgctacgctggcgaatgcgcgtcgtgatctggcgcgctatcagcaactggcaaaaaccaatctggtttcccgtcaggaactggatgcgcaacaggcgctggtcaacgaaacccagggaaccattaaagcggatgaagctaatgtcgccagcgcgcagttacagctcgactggagtcgtatcacggccccggtctcgggacgcgtgggtctgaaacaggtggatgtcggcaaccagatttccagcagcgataccgcaggtattgtcgtcattacgcaaacgcacccgattgatctcatttttactctgccggaaagcgatatcgcgaccgtagttcaggcacagaaagcggggaaagcgctggtcgtagaagcctgggatcggactaactcgcacaaattgagcgaaggtgtgttgctcagtctggacaaccagattgatcccacgacgggaacgatcaaaattaaagcgcgctttaccaatcaggacgatacgctgttccccaatcaatttgtgaacgcccggatgctggtcgataccgaacaaaatgccgttgtggtgcctgccgcggcggtgcaaatgggcaatgagggccactttgtgtgggtgctgaacgacgaaaataacgtcagcaagaagcgggtaaaaatcggtattcaggataaccgaaacgtggtgatcagcgcaggcttatcggcaggcgatcgcgtcgttaccgatggtattgatcggctgacggaaggcgcaaaagtcgaggtcgttgagccgcaaaccaccgtggcggatgaaaaatccccttcccgccatgaaggtcaaaaaggagcgcgcgcctgatgcaggtattacctccgggcagcacgggcggcccttcgcgtctgtttattctgcgccccgtggccaccactctgctgatggcggcgattttactcgccgggattatcggctatcgcttcctgcccgtcgccgctttgccggaggtcgactaccccactattcaggttgttacgctctaccctggcgccagcccggatgtcatgacctccgccgtcaccgcgccgcttgagcgccagttcggccagatgtcaggactgaagcagatgtcgtcgcaaagctccggcggcgcgtcagtggtaacgctacagtttcagttgacgctgccgctggacgttgccgagcaggaagtacaggcggcgattaacgcagccaccaatttattgccttccgacctgccgaatccgccgatttacagcaaagtcaatccggcggacccgccgattatgacgcttgccgtcacctcaaactcgatgccgatgacccaggtagaggacatggtagaaacccgcgtggcgcagaagatctcacaggtctccggcgtcgggctggtgacgcttgccggcgggcagcgccctgcggtacgcgtaaaactgaatgctcaggctgtcgccgcgctcggtctgaccagcgaaacggtccgtaccgcaattaccggcgccaacgtcaactcggcgaaaggcagtctggatggccccgaacgggcggtgacgctttctgctaacgatcagatgcagtctgccgacgaataccgcaggcttatcatcgcgtatcaaaacggcgcgccggtacggctgggcgatgtcgccaccgtcgaacagggggcggaaaatagctggctcggcgcatgggcgaatcaagcgccggctatcgtgatgaacgttcaacgccagcctggcgccaatatcattgcgacagcggacagcattcgccagatgctgccccagcttaccgaaagcctgccaaaatcggtgaaggtcacggtcctgtccgatcgcaccaccaatattcgcgcttccgtgcgcgatacccagtttgaactgatgctggcgatcgcgctggtcgtcatgattatctatctgtttttacgtaatattcccgccacaattattcccggcgtcgccgtaccgctgtcgcttatcggcacctttgcggtgatggtgtttttggatttttccattaataacctgacgctgatggcgctcactatcgccacgggtttcgtggtggacgatgcgattgtggtgatcgagaacatctcgcgctacatcgaaaaaggagaaaaaccgctggcggcggcgctcaaaggcgcgggtgaaatcggctttaccattatttccctcaccttttcactgattgcggtgctgatcccgttgctctttatgggcgatattgttggtcgactgttccgcgaatttgcggtgacgttggcggtagcgattttaatctccgccgtcgtctctttgacgctcacgcccatgatgtgcgcgcgtatgctcagccagcagtctctgcgtaaacaaaaccgcttttcccgcgcctgcgagcggatgtttgaccgcgtgatcgccagctacggacgtggattagcgaaagtgctcaaccatccgtggcttacattgagcgtggcattcgccacgctcctgctcagcgttatgctgtggatagtcattccgaaagggttctttccggtacaggataacggcattatccagggaacgctgcaggcgccgcaatcgtcatcgtatgccagtatggcgcaacgtcagcgccaggtggcggagcggatattacaggacccggcggtgcaaagcctgacgacttttgttggcgtagacggcgctaaccccacgctgaatagcgcgcgcctgcaaattaacctcaagccgctggatgcgcgtgatgaccgcgtgcagcaggtgatctcccggctgcaaaccgccgtggcgacgattcccggcgtggagctgtatctccagccgacgcaggatttaaccatcgacacgcaggtcagccgcacacagtatcagtttaccctgcaggccacgacgctcgatgcgctcagccactgggtgccaaaactgcagaacgcgctacagtcgttgccacagctctctgaggtaagcagcgactggcaagatcggggattagcggcctgggtgaatgtcgaccgcgacagcgccagccgtctgggtatcagcatggcggatgtggataacgcgctctacaacgcgttcggacaacgcctgatttcaacgatttatacccaggcgaaccagtaccgtgtcgtgctggaacataataccgccagcatgccgggcctggcggcgctggagacgattcgcctgacgagccgcgacggcggcaccgtaccgctcagcgcgattgcccgcattgagcagcgcttcgctccgctctccatcaatcatttagatcagttcccggttacgacattttcgtttaacgtgccggagagctattcgctcggcgatgcggtgcaggcgattctcgatacggaaaaaacgctcgccctgccagcggatattacaacgcagtttcagggtagtacgctcgccttccaggcggcgctaggcagcaccgtctggcttattgtcgccgccgtggtggcgatgtatatcgtgctcggcgtgctgtatgagagttttatccatccgattacgattctctcaacgctgcctacggcgggcgtcggcgcgctgctggcgctgatcatcgctggtagcgagctcgatattatcgccattatcggcattattttgctgatcggcatcgtgaagaaaaacgccatcatgatgattgacttcgccctcgccgccgaacgcgaacaggggatgagtccgcgcgacgctatcttccaggcctgtctgctgcgttttcgaccgattctgatgaccacgctggcggcgttgctcggggcattgccattaatgttgagtaccggcgttggcacggaattacgtcgcccgttggggatcgcgatggtaggcggcttactggtcagccaggtattaactctgtttaccacaccggtgatttatctcctgtttgaccgcctgtcgctgtacgtgaaaagtcgctttccgcgccataaagaggaggcgtagatgcgctttttcgcccttttcatctaccgcccggtcgccaccattttgattgccgccgccattacgctgtgcggcattctgggctttcgtctgctgccggtcgccccgctgccgcaggtcgatttcccggtgattatggttagcgcctcgctgccgggcgcctcgccggaaaccatggcttcgtcggtggcgacgccgttggaacgctctttgggacgcattgcaggcgtcaatgaaatgacctccagcagctcgctcggcagtacacgcattattctcgaatttaatttcgatcgtgatattaacggcgcggcgcgcgacgtgcaggccgccattaacgccgcgcaaagcttgttgccaggcggaatgcccagccgcccgacttatcgcaaggccaacccgtccgacgcgccgattatgattttaacgcttacctcggagagctggtcacagggcaaactgtatgatttcgcctctacccaactggcgcaaaccatcgcgcaaattgacggcgtcggcgatgttgacgtcggcggcagctccctgcccgcagtacgtgtaggcttaaacccgcaggcgctctttaaccagggcgtctcgctggatgaggtccgcgaagcgatcgacagcgccaacgtacgccgaccgcaaggcgcaattgaagatagcgtccaccgctggcaaatccagaccaacgacgaactgaaaaccgccgccgaatatcagccgctgattattcactataacaacggcgcggcggtacgcctgggcgacgtcgccagcgtcaccgactcggtgcaggatgtccgtaacgccgggatgacgaacgctaaacccgctattttgttgatgatccgcaagctgccggaggccaatattattcagacggtcgacggcatccgggcaaaactgccggaactgcgggcaatgatccccgccgctatcgatttacaaatcgcccaagatcgttcgccgacgattcgcgcatcgctgcaagaggtagaagagacactggctatctctgttgcgctggtgatcctggtggtgtttttattcctgcgctccgggcgcgccacgctaattcccgccgtcgccgttcccgtttcgctcatcggcaccttcgccgccatgtatctgtgcggcttcagcctcaacaatctgtcgctgatggcgctgactatcgcgaccggatttgtcgttgatgatgccattgtggtgctggaaaatatcgcccgccatctggaggcgggaatgaaacctttgcaggcggcattacagggtacgcgagaagttgggtttacggtcatctccatgagtctgtcgctggtggcggtatttctgccgctgctgttaatgggcggcctgccaggacgattattacgggaattcgccgttaccctctcggtggcgattggcatttcgctggtggtctcgctcacgctgacgccgatgatgtgcggctggatgcttaaatcaagcaaaccgcgcacccaaccgcgtaaacggggcgttggccgtctgctggtcgccttgcaacagggttacggcacgtcattaaaatgggtgcttaaccatacgcgtcttgtcggtgtggtttttcttggcaccgttgcgctgaacatctggctttatatcgccatccctaaaacattctttccggagcaggacaccggcgtgttgatgggcggtattcaggctgaccaaagcatctctttccaggccatgcgcggcaagctgcaggattttatgaaaattattcgcgacgatccggcggtgaataatgtcactggttttaccggcggatcgagggtgaatagcggcatgatgtttattacgctgaagccgcgcggcgaacgcaaagagacggcgcagcaaatcattgatcgactgcgggtcaaactggcaaaagaacctggcgccaggctgtttctgatggcggtacaggatattcgcgtcggcgggcggcaggctaacgccagttaccaatatacgttgctgtctgactctctggcggcgctgcgcgaatgggagccgaaaatacgcaaagcgctctcggccctgccgcaactggcggacgtaaactccgaccagcaggataacggcgcggagatgaaccttatctacgaccgcgacaccatgtcacggctgggtattgatgttcaggccgcaaacagtctgttaaataatgctttcggccagcggcaaatttccaccatttatcagccgatgaaccagtataaagtggtgatggaagtcgatccgcgctatagccaggatatcagcgcgctggagaaaatgttcgttatcaaccgtgacggaaaagcgattcccctctcttatttcgcccaatggcggcccgccaatgcgccgctgtcggtgaaccatcagggactttccgcggcgtccacgattgcctttaacctgccgaccggcacatcgttatcgcaggcgacagaggccattaatcgcaccatgacgcagcttggcgtcccctcgacggtacgcggcagtttttccggaacggcgcaagtcttccagcagaccatgaattcacagcttattttgatagtggcggcgatcgctaccgtctacattgtgctggggatactgtacgaaagctacgtccatccactgaccattctctctactctgccatcggcgggcgttggggcgcttctggcgctggaactcttcaatgcccctttcagcctaatcgccctgatagggatcatgctattaattggcattgtgaagaaaaacgccattatgatggtcgattttgcgcttgaagcgcaacgaagcggcggcctgacgccggaacaagccattttccaggcctgcttgttacgcttccgtccaataatgatgaccacgctggcggcgctgttcggcgcactgccattggtgttatctggcggagacggttcggaattacggcagccgctggggataaccattgtcggcggtttggtcatgagccagctcctgacgctctataccacgccggtggtgtacctctttttcgatcgtctgcggctacgtttttcgcgtaaaaatagcaaaccggtagtagagatatgacagaacttcctgacaacacccgctggcaactctggattgtggcattcggcttttttatgcagtcgctggataccaccatcgtcaacactgcgctgccctccatggcgaaaagcctgggggaaagcccgctgcatatgcacatggtagtggtgtcatatgttcttaccgtcgccgtaatgctccccgccagcggctggctggcagataaaatcggcgtgcgtaatatcttctttgccgccattgtgctgttcacgctgggttcgctgttttgcgccctctccggcacgcttaatcaactggtattagcgcgggttttacaaggcgtaggcggcgcgatgatggtgccggtcggacgcctgacggtcatgaaaatcgtgccgcgcgcgcaatatatggcggcgatgaccttcgtcaccctaccgggacagatcgggccgttactcggccccgcgctgggcggggtgctggtggaatatgcttcatggcactggatctttctgatcaatatcccggtgggaattgtcggcgctatggcgacctttatgctgatgccaaactacatcatagagacccggcgctttgatctgccggggttcctgctgttagctatcggcatggcggtactcacgctggcgctggacggtagtaaaagcatggggatttcgccctggacattagccggacttgctgcgggtggcgcggcagccattctgctctatctcttccatgccaaaaaaaactcaggcgcgttattcagcctgcgattgttccgcacgcccacgttttcactagggttgctgggcagttttgccgggcgtatcggcagcggtatgctgccgtttatgacgccggtctttttgcaaattggtcttggtttttcaccgtttcatgccggtttgatgatgatccccatggtgctgggcagcatgggaatgaagcggattgtggtgcagatagttaaccgttttggctatcgtcgggttctggtagcgaccacgctcggactggcattggttagcctgttgtttatgtcggtcgcgctgctcggctggtattatctcctgccgctggtactgcttttgcagggaatggtgaactcggcgcgcttttcttccatgaacaccttaacgctaaaagaccttcccgatacgctggccagcagcggcaatagcttattatcgatgattatgcagctctcgatgagtatcggcgtcactattgccgggatgctgctgggtatgtttggccaacagcatatcgggatagacagtagcgccacacatcacgtctttatgtacacctggttatgtatggcggttattatcgcgctaccggcgataatttttgcccgcgtgccgaacgatacacagcaaaacatggtcatttcacggcgtaaaaggagcctgtaatgaaagtctggcggcccggaatcaccggcaagctgtttctggcgatcttcgccacctgcatcgtgctgctgatcagtatgcattgggccgtgcgcgtcagttttgaacgcggatttattgactatatcaaacacggcaacgagcagcggctacaaatgctgggcgatgcgctgggcgaccagtaccagcaacacggcaactggcgttttttacgcaacaacgatcgcttcgttttccagattttgcgttcatttgagcatgacaacgaccgcgataaacccggccccggtatgccgccgcacggttggcgcacccaattctgggtcgtcgatcaaaatggccgggtgctggtcggcccacgcggtccggtgccgcatgacggtactcgccgtcccattctggtcaatgacgtcgaagtcggcgcgattatcgcctctcctgtcgagcggctgacgcgcaatacggatattaattttgatatgcagcagcggcgcgccagttggatgatcgtggcgttatcaacgttgctggccgcgctggcgacatttttgctggcgcgtggcctgctcgccccggtcaaacggttggtcgaaggtacgcacagactggcggcgggggattttaccacgcgcgtgactccaaccagcgctgatgagctgggaaaactggcgcaggactttaaccagcttgccagcacgctggaaaaaaaccagcagatgcgccgcgactttatggcggatatttcccacgaactgcgcacgccgctggcggtattgcgcggcgaacttgaagccattcaggatggcgttcgccagttcacgccagaatcggttacctcgctacaggcggaagtcggtacgcttaccaaactggttgacgacctgcatcagctgtcgttgtctgacgagggcgcgctggcttaccaaaaaacgaccgtcgatcttgttcccctgttggaagtcgctggcggcgcgttcagagagcgctttaccagccgggggctaacgctacattacgcgttgccggatagtatgaccgtcttcggcgacccggatcgcctgatgcaactgtttaataatctactggaaaacagtctgcgctacaccgacagcggcggcggcctgcatatttccgccgaacaacgcgacaaatcattattcctgacctttgccgattctgcaccgggcgtcagcgatgaacagttacaaaagctttttgaccgtttttaccgcacggaagtgtcccgtaaccgcgccagcggcggttctggactggggctggcaatatgcgtcaatattgtacacgcgcataacggtcatcttcacgccgctcattcgccttttggcggggttagcattacagtagagttaccgctggatcgcgatttacagagagaagtatgactgaattacccattgatgaaaacacgccgcgcattttgattgttgaagatgaacccaagctgggacagctgcttattgactacttacgcgcggcgagttacgcccccacgctcatcaatcatggcgacaaggtactgccgtatgtgcgtcaaacgccgccggatctgatcctgctggatctgatgctgccgggtaccgatggtctgacgctatgccgggagattcgccgtttttccgacatccccattgtgatggtcacggccaaaatcgaagagatcgaccggctgcttgggctggaaatcggcgccgatgattatatctgtaagccttacagcccgcgcgaagtcgtggcccgcgtgaaaaccattttgcgccgctgtaaaccgcagcgcgaactccagcagcaggatgccgaaagcccgttaatgattgatgaaagccgctttcaggcctcctggtgtggtaaagcgctggatttaacccccgctgaattccgtctgctaaaaaccttatcgcttgaaccgggtaaagttttttcccgcgagcagttgttaaaccacctctacgacgactaccgtgtggtgaccgaccgtaccatcgacagccatattaaaaacctgcgccgtaaactggaatcgctggatgccgaacagtcatttatacgcgcggtctacggggtgggatatcgctgggaagcggatgcgtgtcgcctggtataatgattattggcataacaataacaaggtcgtaagacgatattttccgccaacgctattctggcggaattaacacactgccctctttcctttggccgagcggtatcccgaaaaccacgacgaacgcgatcggggacaataaattatttggccgctctttttagtttaccgatatactgtgagtagttttttaaacttattgcgcattaattcattaagtgaatctaaaaatacataaacataataccagcttaattatacatggatttttatgacagaaacgtcatctcaccgctataaaccacgcaatataataaatgcgccaaatgtaaaatcgtctattttttcccggagccaacaacgcggcgacagcgaaattatccagcgctggttaagcaaccatttttatcgttggatcattggtgactttcctcatgtttatcctgtgcgctccgtcgccgattatgccgtttattttagcgctgatgcagaaatccccgcctggctggcgccaaagctgggtggcgatgagcgcttttactaccttaacgttcagcacccgcaacttgtggcgatggaaagagatttagtggaatttctttcgcgtcaggaaggaacgcggctggaaactaaactacagcgtatcaactgctttaccgtgctggcaatgcgcgaagcggagcatcaaaaaatgcagcgcctgcgtgaacaaggttggtatccctccaacagcgaggcgctaaaaccggtgatgacggtgaataacggcgtactggttgagcttgatgcaacaaaccccggcctgcgcagtgagatggcgtatgaatcctggcatatgcaacactgcgtcggagattttgataataaaggcgcgctttccggcggctacggcgattactacgcccggcaaattgaacaacagaaacttcgcctgttcagcctgcgcgacggcaataatattccccacgttacaataagcctggtggttggtaataacggcctgagcattgatcagattaaaggtaagcaaaatcgccatcctattaagaaatatgctaacgatgttttatctctgttacgccatctgcaaccacttcctgagcgccacgctgattgcgaagggatgggaatagtttatgaattgacgccggaatattcaggttggaaatttattacgcatattcatgacctcaattttctgctcaatgtgctgcatgacaattttcacttaatggaacacttccccactcccccggtagctttacagtggctgctgctgcacagcgccccggaggcgctgcgctaccttcaggttgttgatcctaacgtggcgacggctgcggaaatgctgtttccgcagcatgaatggcatcctacgcttgccgggaaaaacaccagtagcgaacctttcgaaattgaaagcctgacgctacaaaccacgcgctacctccctgtcatcaaggaggtgcaataatgttctggattgttcttattattgccgccctattttttagctggcgcaactacaaaaaaaacaaaccgctgattgcagcccgtatcgccgaggagaaagaaaaagatcgcctgaaagacctgcgtcgcgatacccgacggcggcaatgggcgctggcgctagctgatatcctcgcccggcgcaacgggctaccgatcaaaggcgttgagctggtatttaaacttgacgatgacaaacgccgctatctggcgcagcaggtaaaaaaagagctgggcttgagcgaaaacctcgacggcgcggcgttacgccacaaggtcgaggatatcttacgccgctggcctgcgggcatcggcagctcgccgcgcacgttttatcatcatctggcggcccagggccaggtccgcgacgcgctggctttcgactgcatgcgcaccgcctttctgacccgctgtatcgccgggctcggctggtgcgacgtacatcaggcctggctggtgttattacttaacgcccagcgcgctcaggactgttttgattcctgggaggattacgccaccgcctacgttcgcgcccgccgggtatggctcacgctacgtgacacgccaacagcgcttgccggacgggatttacaggaagccacccattatctgcaagaccctgtcagccgctggcgacaactgccgtggaatgaattcaaaattttcgagccgatttaaaggacgctttatggaacaggatgatcgtctgctcaacgctatgtttgagatgtgcaaccacaaaaatcccctcaatgacgggcaacgagagtggcatatcgccgatattcccggcctgctgcgcgaagaacgctatgacgaactggacgaacgctacaaccaggcgctgacggagagctttaccagccgcgaagcggaaaagcgctatttcttcgcctggaatcaaatggacaaccctttttacgatatggacacgctggttgaggctgggccgcaaggattagcgctgatcaaaaactggcagcgcgcccgtcctcgctccactcacgcctggcttgccgaggcgcaatactggaatcaccgtgcgtggctttaccgcagctatggctgggcgagagaaaccacccgagcgatgtggatctgcgccgccgcctgcaacgaacggatggtcatcgccgcgctcaatgccatcgactgtgaaccgcgccagtggatggcggcggccctgaccagcaccaactcaaaagtcttcggccagcccgagtggctggttgagttcctcgtgggcgcggatgttgccgggcagccattaatggaagatctggctgaatatcatcgccattcaccgcaggaggtggacgcgctgatggcccattccgggttgtcgtttaccgacgcggtttgcccaaatttgccgcgcccgtccgtgctgccggagtgcaatgacgatgccgggcaaaaatactggctcgccgtctgcctggctattttcccgacggcattttacgtgctggatgaatatatcccgtttcgtatgccacgctggagagggtctcacgaggaaatccgcgaatttctggaatcaagcgtatgcgatcacctttctgccgcagaacgtgaacatctggagctattgatctggtgggacgatcaccgcgatctgcgcatcaaagaggttgactccccggcagaacaggaacgtattatcgccaaagccgaagagattagcctgcgagcgcatatccaggaatctcgccacaacgcgctggagtggctgcgggtctgctatagcgatctggacgataatgacgcgctctggcgaacccttcagcgttcgatcgtggaaaaagttaagctcaacaattacttctctgatgacacgataaagttcgccctgcgcgattttcctgacacctggtggatgtataattttctctgtcagaatgcgcagcaaacggaattcgcagtgccgaaaatccgtcgtggctactttcagtacgccgggttattgggtttcgaaaaggatgaggcgcaaggcctcgcctggctcgatagcgtcgccgacattcaatataaccataactggcgggcggcgattaaaaatttcgactggttcgggctcccggaacatttcgtgccgctggcagagctgggcgcacaaagaaatatacccgccgcgctaaacttgctgggccttgaacacaataataaagagaacaacggcctactaccttacgatcctgccatcgcgttagggtattttcagcgcgcggcggagattttgcaccggcagttagcgctgcgcgagagcaccccgtacaaattaatagataacggaggctataccgactatgaaaatgacctgcaaaatattcatttcagcattggcatctgcaaccagcgtctgagtaaacaagaacctgataccgaaaaacgttccgcttatgaaaaagaactactcgataatctctggctggcgcatcagttcgggcataaagaggcctggggcttgttcctgctgaatatttttgaagtgaaggatattacgctggcgcataagcatctggaactggtgcaacaagaggccaacaaaggcacgctacatgctatggtgaccctatcgcgcctgcacggtaataaacacgatcgaacgctgtttaatatgaagctaagcgcacgctgggcgcattttgccttcacactttacccggataatgaaatcgttatggactgcctggaccacctgcatttcgattctttctggaaacgctttcgtttcgcctggtataccgtccgtatcccgaattcagagctgccgggacaggtcaactcaatggtgtaaggtggtttactcccctctcccacggcgctacaatgcccgcccttaaagtgaggactctcctcaagccgcctcatcaggtgaggcggatctgacctgtcatcagaacgagaaaatgatgtttaaaccagaactcctttcgccggcgggaacgctgaaaaatatgcgttacgctttcgcttacggtgccgatgccgtctatgcgggccaaccacgctactctttacgcgtgcgtaataacgaattcaatcacgaaaatttgcagcttggcatcaacgaagcccacgcgctcggaaaaaaattctacgtggtggtgaacatcgccccgcataacgccaagctcaaaacctttatccgtgacctgaaacccgtcgtcgagatgggcccggatgcgctgatcatgtccgatccagggttgattatgctggtacgcgagcacttcccggcaatgccgattcacctgtcggtacaggctaatgccgtaaactgggcgacggtaaaattctggcagcagatgggactgacccgcgtgattctctcccgcgagctgtcgctggaagagattgaggaaattcgccagcaggtgccggatatggaaatagaaattttcgtccacggcgcgctatgcatggcctattccggccgctgcctgctttccggctacatcaataaacgcgatccgaatcagggcacctgcaccaatgcctgccgttgggaatataacgtgcaggaaggaaaagaagacgttgtcggcaacatcgtgcataagcatgaaccgattccggtacagaacgttgagccgacgctcggtatcggcgcgccgacggataaagtgtttatgatagaagaggcccaaagaccgggcgaatacatgaccgcgttcgaagacgagcatggcacctatatcatgaactcaaaagatttgcgcgctatcgcccacgtggagcgcctgacgaaaatgggcgtccactcgctgaaaatcgaaggccgcaccaaatccttttattactgcgcccgtaccgcccaggtctaccgtaaggccatcgacgacgccgccgcgggtaaacccttcgaccctacgctgctggaaacgctggaaggtctggctcatcgcggctataccgaaggtttcctgcgtcgccatacgcacgacgattaccagaattacgagtacgggtactccgtttccgaacgccagcaatttgtcggcgagttcaccggtgagcgtaaaggccaactggcggccgtggcggtgaaaaataaattctccgttggcgatagtctggagctgatgacaccgcagggaaatatcaatttcaccctggaacagatggagaacgccaaaggcgacgctatgccggtggcacctggcgatggctataccgtctggatgcccgtcccgcaggacgttacgctggattacgcactattgatgcgtaatttctcaggcgaatcaacgcgtaacccccatgctaagtagttaattgcggttattttttcatggcgggaagattcttagaaattgatcacataccgcttcgctcaatgcgggtattattcaacgcgctgaaaaacataacccataaatgctagctgtaccaggaaccacctccttggcctgcgtaatctcccttacgcaggcttattttttgcgtataatccataaaaaagtggtacttcccgccatatccaaaattgaccacactaaccaaagcgcaaatgggcgcttaggtttagagacctcccctatccattgccagccagcaagtcacaatcctccccgcatccggtcggactcaggacttagcattgtgacgttaacgtttaaaatcagtgaattaaatcaataactactttgtgagcacttacacaaaaagtttccaggttattaaattaaggttaaaaactgataatttaagcgtgtaaaaatatggcacgttttaatgccgcttttacaaggattaaaataatgttttcccggattagaggtttgatttcatgtcaaagtaatactcaaaccatcgcacctacgctcagtccaccttcatcaggccatgtaagttttgctgggattgattatcctctattgccactaaatcaccaaacgccgctcgtttttcagtggtttgaacgcaatccagatagatttggtcaaaacgaaattcccattatcaatacgcagaaaaacccttatcttaataatattatcaatgctgctataatagaaaaagaaagaattatcggtattttcgttgatggcgattttagcaagggacaaagaaaagcattgggaaaattggaacaaaattatagaaacataaaggttatttacaattctgaccttaattatagcatgtatgataaaaagttaacgacgatttatttagaaaacatcaccaaactggaagctcagtcagcaagtgaacgagatgaggtcttgcttaacggggtaaaaaaaagcctggaagatgtcttgaaaaacaatccggaggaaacgcttatttcatctcataataaagacaaaggtcacttatggtttgacttctacagaaatcttttcctgctaaaaggaagcgatgcctttctggaagctggtaaacctggttgtcatcatctgcaaccaggcggtgggtgcatatatcttgatgcagatatgttacttactgataaactcggtactttgtatttacctgatggtatcgctatccatgtaagtcgtaaagataatcatgttagccttgaaaatgggattattgctgttaaccgcagcgagcatccagcattaataaaaggactcgaaattatgcacagtaaaccttatggcgatccctataatgactggctcagtaaagggttgaggcattattttgacggttctcatatacaagattatgacgcattttgcgatttcattgaatttaaacacgaaaatatcattatgaacacaagcagtttaactgccagttcttggaggtaatcatgatagccttgttttactcacccttcccaccgtcacgtataatcggtatccagagttattcctttatcctgtaaaatgtgatacagattctccattgatctaataactacctcaatttcacattcaagtttctctacagaactttcattgagtgagaagttgagagccagtaataatgattgtgagttattatcataacacaaatgtggtccattattctctgcaaaccataaattagcattgagaaattcaaaagcaagattattattatccggaggttttccgcaaaaaccgtatatcattatatactcactgttagtgcttgttagtaagatacggtaacggttatctataataaatgagcataatctgttttcgtcaaagacaattgaatcggtatttaattttagtgaaaactgtcttaataagcgatcggctcttgaatacataacaccccatactctatctaaagcgtttctatataagtcataagcctctggtctggacgattaacaccccgtgtcatcgtcggaattcgtcttttccctatgacttgctgtgtttgctcatttatggccaggctggccgggttctgatgccatttgcgctaaggtatagtccggcgcatattcccatcataccaattccccccatgccaaacgatgcgcctaaaaccgttagagcggtagtatatgccgcaccactactgacactggcgacagcccctgagcataccccactgaaaacacttgtaaacaatgccgtggttcccaggcacattaaacatctgggtttattgccgtaagcgttaaaatcaacgatttcagctaccggtttttcgtcattaccccgttcagaaggagggagcaatggcgtttgcgcattcacgcctgaagtgacattcatataaacctcttcatgcacatgcctgtttatgtttatgagaaaagcgatacatcaggcaacggtacgactataggacaccgcgctaagccatcatctaaataggttttatttgatatatagtagcgtgcttctaatagtgcgccgtgtttctgctaaagagtctaaagaacatttcgattttatgctattaaaaagtatgtttggtaataaatatcaggtttttatctgatattatggtgtttgaaattaatactgataactgacgtatgttcgtcttgttaattctccgtttcgttatcaaaggcgctatatcggaaagcgtctgactaccccttgtgatttccttgcactctcacaagcgctactcaatgcgcataccggcatctctcttgtcgccatttgccttaaaccatgcttcgcttaccgctgcgtacagcaggaagaaaaacggtaaagcaataagtgcgcaacatttcaattttcatcctgttctgacctcgctttttcatttctgctatacactttctggagattgttgttcaacctattaaggcataacggatggctaactttcccgccagcttactgatcctcaatggcaaaagcgctgataaccagccgctacgtgaggccattactctacttcgcgacgaaggcatacagattcacgttcgggtaacctgggaaaaaggcgacgcgcagcgttacgttgatgaagcccgtagactgggcgttgaaacggtgattgccggcggcggagacggtaccattaatgaagtgtcgaccgcgctcatccagatccgcgacggcgtagcccctgcactgggccttttgccgctcggcaccgccaacgattttgccaccagcgccggtattcctgaagcgctggacaaagcgctgaaactggcgattgccggaaacgcgatggaaattgatatggccatggtcaatgataaaacctgttttatcaatatggcgacgggcggttttggcacccgcattaccaccgaaacgccggaaaaacttaaagccgcattgggcggcgtctcctatcttatccacggtctgatgagaatggatacgctgacccctgatcgctgcgaaatacgtggcgaaaactttcactggcagggcgatgcgctggtgatcggcattggcaatggtcgtcaggctggcggcgggcagcaattatgtcccaccgcgctgattaacgacggactgttacagctacggatttttaccggcgaagagctgttgccggcgctgttttccacgctcacgcagtcagatgacaatccgaatattattgacggcgcctcagcgtggtttgatattcatgcaccgcatgaaatcacgtttaatctggatggcgaaccactcagcgggcaagaatttcatattgaggtgctgcctggcgcattacgctgtcggctgccgccggactgcccgttgctacgttaataacacctgtcgctggccggatgcgctcacatccggcttttcttcgttgaactcaggcgatggtgactttgctatccagatagacatcttgtacggcgttaatcaacttcacgccatcagccatcgatttcttaaaggctttacgtcccagaattagccccattccaccggctcgtttgttgatcaccgcggtacgaaccgcgtcgccgaggtcagtgtcgccgccgtccgcgccgccggagttgataagcccggcgcgtcccatatagcagttcgccaactggtaacgtaccaaatcgatcgggttatcgctggtcagtttgctgtacacgcggtcatcggtatagccgaagttgactgctttataaccgccattattctcggccattttctgtttcacaatatccgcgccaatcgtagcggccagatggttggcttgccccgtcaggtcagcggatacatggtaatcaacgccgtcttttttaaaggaagaattacgcaggtaagcccacaatacggtcaccatacccagctcatgcgcacgctcaaaagctgcggagatctcttcaatctggcgacgagactgttccgaaccgaaatagatcgtcgcgcctaccgccacggcacccatattgaacgcctgctcaacgctggcgtacagggtctgatcgtactctgtcggatagctcaatgtttcgttgtgattcagtttgaccaaaaacggaatacggtgcgcatagcgccgtgaaaccgaggccagtacgccgtaggtagaggccacgcagttacagccggcctcaatcgccaattcaacaatgttttttgggtcaaagtagcgcgggttagccgcaaaagaggcgccggcggagtgctccaccccctgatcgacgggcagtatcgaaaggtatcctgttcccgccaggcgtccagtattatagagcgtctgcatattacgcagaacggctggtggacgattattgtcaatcatcacccggtcaacataatccttgccgggtagataaagctgatcggaaggaatggtcatacaacgatgctgtaaaaggctgtcggcgtctttgccaagcaactgcgcaatatcagtcatagctatgctcccgtaagttccgatagggtatcggaaggtgaatagtcctgccccgcagattgcgggtcgcaataagcctggtactgaccgaccatttttgccaactttagcgcattttttcggcgctatctgctgactcgattcacgtccgaaaaagtgttagatcggtcaaaattaatgctcaatggtatttaaaaggtattattaaatggtattgtcatggcgtaccttacctgtcatgaaggattcaaaaatgaaaacgacctttaaactgtcgttcatgatgttcgtggagtggtttatctggggcgcctggttcgtccccctgtggctatggctaaataaaagcgggttttccgccggtgaaataggctggtcttatgcctgtaccgccattgcggcgatcctgtcgccgattctggtcggctccgttaccgaccgttttttctcagcgcaaaaagtcctggcggtactgatgtttgcaggcgccgtgctgatgtatttcgcggcgcagcaaaccaccttcgccggattctttccgctgcttctggcctattcattgacctatatgccgaccatcgcgctgacaaacagcattgccttcgctaacgtaccggacgttgaacgcgattttccacgcattcgcgttatgggaaccattgggtggattgcctccggcctcgcctgtggattcctgccgcaaatgttaggctataacgatatttcccccaccaacattccactgctcataaccgccgcaagttcagcgttgctgggcgtatttgcgttctgtctgccagacacgccgccaaaaagcaccggcaagatggatattaaagtgatgctggggctggatgcgctggtcctgctgcgcgataaaaactttctcgttttcttcttctgttcctttctgtttgcgatgccgctggccttctactacatcttcgctaacggctatctgacagaagtaggaatgaagaacgccaccggctggatgacgctcggccagttctctgaaatcttctttatgctggcgctgccctttttcactaagcgctttggtattaaaaaggtattattgcttggtcttattaccgccgcgatccgctacggcttttttgtctatggcggcgcggagacgtacttcacttacgccctgctgttcctcggtattttgctgcacggcgtaagttacgatttctactacgtcaccgcctacatttatgtcgataaaaaagcgccggttcatatgcgtaccgctgcgcaagggcttatcaccctctgctgtcagggattcggcagcctgctgggctatcgtctcggcggcgtgatgatggaaaaaatgtttgcttatccgcaaccggttaacggtctgacattcaactgggcgggcatgtggacgtttggcgcagtgatgattgccgtcatcgcgctactgtttatgattttctttcgcgaatcggacaaagagatcactgctattgacgatcgcgatattgcgttgacacaaggggaagtaaaatgaaagcagaacgtattctcggtgctctttacgggcaagcgttaggggatgcgatgggaatgccctctgagctgtggccgagaacgcgcgtcaaagcgcatttcggctggattgaccgctttctgcccgggccaaaagaaaataatgccgcctgctattttaaccgcgcggagtttacggatgataccgcaatggcgctctgcctggccgacgcgctactcgaatgcgaaggcaacattgatcccgagattattgggcgtaacatcctcgcctgggcggaacgctttgatgcgttcaataaaaatgtactcggcccgacgtcaaaaatagcgctgaatgcgattcgcgacggcaaacccatcgcggcgctggaaaataacggcgtgactaacggcgcggccatgcgcgtttcgccgttgggctgcctgttgccgccaactaacctgacagcctttatagcagaagtggcgttagcctccagcccgacgcataaatccgatctggcggtggctggcgccgtggttgtcgcctgggccgtctcacgagcggttaacggcgacacgtggcaaagtattgccgactcgctccccgccgtcgcccatcaggcgcagacagcgcgtattaccacgtttagcgcctcgctatcggcacgtctggaactggcgctaaacattgtccgccatgccgacggcgtcgaatctgccagcgaacagctctatcagatcatcggcgcgggaaccagcaccattgaatcggttccctgcgctatcgccatggtggaactggcgaataccgatcctaaccgctgtgccgtgctgtgcgctaacctcggcggcgataccgacactatcggcgcgatggccaccgccatttgcggcgcgttgcacggggtaagcgccattaacccccagttaaagcaaacgctggacgaggttaatcagctggattttgcgcgctatgccgttgcgctggcgagttatcgtcaacggcgggaggcactatgaacggcgcacggttgctgacattattaccgaccctgcatacccggcgtccgctcaccgttatcggcgcggcagtgatcgatatcattgccgacgcctggacgttgccgcgtcgcggaggcgatattgaactgcaacaacagagcgtcaatgtcggcggctgtgcgctgaatattgccgtggcgttgaaacgactggggattgacgccagcaatgcgctgccgctgggccagggcgtgtgggcggagaggattcgccgccgtctggcaaaagagggattatccagcgtgattgacgcggttgaaggagataacggctggtgtctggcgttagtcgaaccggatggcgaacgcacgtttatgtcttttagcggcgtggaaaaccagtggaatgcagactggttgtcgcagctcaggacaccgcggggcagtcttgtctacctgtccggctatcaactggcctcgtcctgtggcgaaccactgatccagtggctggaaaccgtcgacgatgtcacgccttttatcgattttggcccacgaatcggtgatattacagacgatgcaatggcgcgcattatggcctgccggcccatcgtctccctcaatcgccaggaagccatcatcgccgcggaacgcgccggacttgcgaccgatacgcgcactttcggcgaagcatgggtaaaccgcttttccgcgccgctggtggtgcgccacgataaagacggagcgtggtattttagcgcgcaatcttccggcgttgtgccagcgtttccggcaaccgtggtggataccatcggcgcgggcgacagccatgctggcggcgtgctggcaggactggcgtcaggctggtcgctcgcggatgccgtactgctgggaaatgcggtggcgagctgggtggtcgggcatcgcggcggcgactgcgcgcccacgcgcgaggcgctactcctcgcacacaaaaacgtataggtcgctacgacaataactgatgctgtattcaataggccgctgctgctgatcgagcgccacctgcttaatcaccagcaccggcactttaccatccatttgaatatgcgactgaaactcatcatccggcatccgggcgctgacgcgggatcgggtacgctgagggtaaatgtgctggcgacgaaaatagtcatacagagaaataccaatcgcgtcgacatcatgaatcagatgcgcgggcacccaggactcttcaatcgataccgcgtcctcatcaacataacgaatgcgtttgagtaaaaagacgtcgctgcctgcggggatcgccaggtgctgcgcgacctcatccggacaacttaccacgcgtttgttaacccatagcgtatccggttttttgccgcgcaagacaacctgctgagaaaatccccgcgcctctttcagggaatattcaaagatattattgatttgcgtaccgtagccgcgggcgcgcgtgacaacaccctcttcttccagcgcctgcatcgcttttcgtaccgtgatgcgcgagacgccggtaagctggctgagatcgcgttcgccaggcaaaatattaccgtgctcaagaataccgctgcgcacggcatcctttaccgtctgggcgaatttcatgtatagcggcgtattatccgccgctgaaattcgttcattcagttgcgcgatgagccgggtatgcgcttgttccatttatctttcctgacgacgggtctgtaggcagtatactaccaccacgcgtggaaatgatgtaccggaccaatgcccttccccacttccagcgtgtccgcctgcgccagcgccgccgaaagccatgccttcgcctcgtttaccgtctctccccaactgcgatgccggggccgtaacgccgccagcgccgccgacagcgtacagcccgtcccatgcgtatttttggtgttcacacgcggcgcgctaaaacgctgctcgccctcgcgggtaaagagccagtccgggctttgcgcatcctctaaatgcccgcctttcatcaataccgcttcacaccccatcgccagtaacgcccgcccctgcgccagcatctcctgttccgtacgcgcatggggcgcatccagcaacgctgcggcttccggcaaattaggcgtaatcagcgatacctgcggcaacagccggacgcgtaatgtttctatcgcagagggcgagagcagcggatcgccgcttttcgccagcatcaccgtatccagcaccacattacgtacatgatggcgctgtaaccgttccgccacggcctcgacaatatcggtttccgccagcatcccgattttcgtggtatcaatgcgcacatcgctgaacacggaatcaagttgagcggcaacaaagtccggctctatccggtacaccgactgtacgccacaggtattttgcgccaccagcgcagtgatgaccgaacagccatatgcgcccagcgcggaaaaggtcttgagatccgcctggataccggccccgccgctgggatcggtgccggcaatcgtcagcgcgttaattcgttgcattggccgcctccacatccagatgatagagcgcatcaagaaaagccgggatgaagctacccggtccttcgctacgctctgccgcggcctgtccagccagtttcatccagcagcaggccgacgcgacattgtccagcgcggcgcccggtaacgcgcaactggcggcgacgaccgccgacaacgcgcagccggtgcctacaatgcgagtcattaacggatcgccgccgggaatgctcagcgtgcgctgaccattagtgacgtaatctatctctccggtaaccacaacgatgcagtctatctgacgcgccagcgcctgcgccgcaggcagtgcggccaacgccgcctcggtggtatctacgccacgtccgcccagcgccatgccggataacgccaggatttccgaggcgttgccgcgtattgccgccgggcgcagggacaagagatccaggcaaaatcgccgacgaaattccagcgcgcccaccgcgacaggatcaagcgtccacggcgttttggcatcataagcgctttctaccgccgcacgcatcgcgtcagcgcgtgaggcagttaatgttccgacattaatcagcaaggcgttggcgatggcggcaaacggtctggcctcgacaggatcaatcaccatggcgggtgaagcgcccagcgccagcaacgtattggcggtaaacgtttgtacgacgtcattcgtcatacagtgcgtaagcggggagagcgcgcgaaagtgttttaacgtatgcgccgcaagcgtgcggcagtgcaggtcaggctgcatggttcagctcctgcccgcgtgaagaagggacacgagcagtgtcagacttccctacgctggcattatccagatcaggtggtacgggtatttctcagccttcacaaagaagggcaccccgagtcgtcaagccccaccgtgttaagcggggtttcgctattaagcatactgtctgtgccagacaatgtaaatttacagtcagcggcggacgataatttcagcgttatcagatagttctcaaaacctattcggttctggcaaacttgctggcggatatgttgctgcacgacgctttcgtttacactttttacgaaaaggggcgtgagataacaaaatagcgcttgtcagatacgccaccagcagaaatgatacacacgatgttaactgacccgcatatgtggagggtaaaagtatgaaaagtaagttgctgccttgcgcgctgttgcttgcaaccagttttgcatgggccgcccccgcgacaacgggcattgatcaatatgagttaaaaagctttatcgccgacttcacccacttcaagcccggcgataccgttccgcaaatgtaccgcaccgatgagtataatattaaacagtggaaattacgtaatctgcccgcgccagatgccggtactcactggacctatatgggcggcgcgtatgtactgattaacgataccgatggaaaaatcatcaaagcctatgatggcgagattttttatcatcgataaaaaaagccccctcatccagagggggaaatacagccccatgttacttttttattagcccttaatcactctatccccttcaaactgccttttttgttgactgccttcactacccgattcgctctggatctcgcccttttgaaactaccgcataccacattaaaatttattgcagaaagattgtcatcccggtcacttattattgtaagtgaccggaagttcattcacctatcgcgccatatatcttaaatgtttttcatatatattaatcgtatttcacatagatcagcgcagtcgcttttagatcgcctggctttatattgtctcggtcataaacataataactggcgataatagggattgttatcatatcactgttgagcggcgtgcctacttgatccactttccataacgttgaagcattaccctgctctgctgtatttgaaatattcaccgtttttccaccgctctccagtataaatccgacgccattattcacagcaccacgcaacacagaatagctatctggtattaaatcactgctggagagataaaccgtcattttacgcgatgtttgtttagcattaccaaaaagattatcacactggagtcgaatattatccgcggcatttttgttgctgaccttgcctgtgttatataattcagaaagcgcaatattcggtagcgtgatcgtcagatcttcaggtttgcaggttgtctgcttgcgatcgtaggacacaaacagatcaaatgaatataaccctgcacctctaagataactattataatctgcggcacaggcattccaacctcttcctgctagcaggcaccctaaaaaccgcaaaccggccgtaaactgagttgcagaagaagcgcttgttattgataccaccccgttgattaggacactgttcccactaccggcagaaatatttacattcgccccagaggaagcgggttcaaccgttaccgtatagcccgttgtaaacggcattgtgagagtattattatctgcccaggcgatttttaacttcagttttactgtatcattgtataatcccacgatgatatcggaaggatccatacgcgttatcttataagtccctgaacaagttgtatcgttaaaattatggctataagttgcggactgattagggttaatcgtaaaatcctcacgaataattaaattatcctgataagtaatttctcccgtacaggctgcgtatgtttcaggtaaaatcaataacatcacgataaaaagaaagagtttcatttcaccacctcaccactaccgacaaatataaactttactttcatcaaccgttttaccaaaggtgattgaacatgaaagcccctgctctttatctactggtacactgacttcgggcggaatatcattcgttcgaataaatagctgactaccttgtccaacaatgcccacattatgaccatgatgatctactacatcataaccaaaaataagaggcgaaccatcaggacgctgcgctttaataaaccatggtttacgctggtcggtatcaaaattcactagcacgacggcccctcggtacggggcggcaactttacggttaccgcgtaattccgtttcactgctactttgcgacacatcaagcataagatggttttcgcgatatggcgtaaggttgtcataaaccaccgttccttttttattggtggtccgatatttttggccgttaacgtaggctccttcaagtcccggagcctgcataatcgcaaaggtatctgaaagccggctggataaattcaacccgccactccaggctacaaccccaccggaaatacttccgccggtctgagtataattggacgactggctgtaactaccattaagcgttgcaacgggcgtattccaggttaaattcgtccccgcagtggtctcactatcgtgtcgctgatgactaacactcacgccgtaattaaattgatcgcgactgcctgccgtaccggttaaaccaatattgtttgaggtaaatccatcatcatcaaaggtcgtcgagttcgacacattcagatgacgccgcggggtagtaataccgtccccccagtcaaagggaattgaaataaacaggttaaaacgtttatcttcattatgatcctcgtcgtaagtctgactggcggataacgtataattaattttctggaacgtattggaatagcttatttgataatctttactggtgccgctacgtccccagtaatcacgccataatgcactcagtgatactgcgccccatccttctggcaaggattggctcacattagctgaaaacgtatttttacgcccaaaatcgttttgataataatcagcaatatcgtatacatcattcttatcgcgacgatagttatttttattattggcccagacatgatcgttaaatgtgcggtaatcctgtgatgaataccgatacgcagccagaccaaaccgagttaatgtttgggtcaggtatttattataagcaatctgataactctgaccatcaaatacatcgccattatcctgtttactgtgcgctcgcgtagcgtcaagcgaaatggcgccaatccgggtattccaccccgtgccgagggtaaacgcattataatggttcgatagcatcgtaccgccataaagcgtcaacaggttattaaggccatactgataactgatttgtgtaaaatcggcctgattatcggcgccttcaatatgactacggccggcggaaaaatcatacttagagacgccaggctgcaacatgttcggtacggaagcgtaaggcaccagccaggtatttatcgaaccatccgcctcacgcacggtgacatcaagatccgcgccaccgcccgcgagttgcagatccgcaatggaaaaggggccaggaggaacctctttctgataaacaacgaatccgttctgttcgatggttaccaaagcgttagtctgtgcaatcccctgcaccaacggcgtaaaattctgtttcgagtttggcaacatttgcatatcgcgaaacaggcgaacgccggtaaatctcacagaatcaaaaatctctgacgaggtatactgatccccggcgcgtaatgtgccgaggagctcagcgataccgcgctccagatacaatgtgttgcttttccactcaccgctgctgccatcggttttattaaatgtggtatccgcatgcgcttgccagcccaacagattgaaaccgctattgaaccgaacgtaagtactttcactactgccagaattcttatagtcactgtaatactggctggcatagtaagaagtataaaatgcattgatgccgcgatcccagttttcaggcaatacataacccgcctcgacctcatttacataggcctggggaacgctcaaatccagccgaaaaacgccaatattaaaagtatagccaccgcttctcacgacatcttttaacgcaatacaatccgttgctccctgcggttgcagaccatcgcttatcacaccaatatttttcaacaactcagttgaaatacacgtgctaccgggatcatcggcaacaatgatatcgtatttacctcgccattgattgttgacataaatatccaattcgtactgtcccggaattggcttattctcatccagatggaaatttgttattttttgatctctcattccccccaccataaaatgggtatcaaacgtttccgtcgcgatagcctgcgtttgccaggtaaacagagtcaataaaacaagcgaagcgatgggcgtcatccttagcatgatgaactcctgtttattttacattcattttgctactaatatagttaccattatcatcaataatcgttacttcatactggcttgttgacgcatatttcatgttaatattttgcgtcgatagcggtggcagcatgatagtttgatcattaatcttagtatttcctgcttttacatccgtcacggtaatccagtttgcagtatcatttttcatgatgacagctttattactgcgaaataaaccaatcctctgaaaactgtctttggttacggcggcaattcgactggggcgccatattaattttattcgattctgcattgcgaatttaagcacatttttaccggcgttttcctggctgtttggtggaatatcaagcacattcagataaaacagactttctttgttgtccggtaagctattaggcattttcttgattttgatctgctgaccagactcagcggcaacgcgcgccactggcggcgtcagcataaatggcacctgaattttttctggcggtaatgaagtgttaccgtcatcaatccaggactgtaccagcgaagcttgctcgccctgattcaccaattgtacaacgacttctttcttctctgccgggtaaatcacacgcgtaccataaataacaataccagcatgcgcaggcaaaattatggcagataataatactgcagataatattttcatatttacacggccttgcttataaaaaaccggcgacgaacgccgccggttgaataaattagtcagtaacaaccgttaaagtcagtgttgagctaacatcaccagaagcaacatcaccgtctaaacgcgcatagcgtgctaaaaaagtcaggtcgtattcaccgctgctatttggatctagtgtcacccccgtctctggatcaatctgattatccgtacttccgtagtaaaccgcaaaaccgacacctttggcagacccgttattaaatgtgatatcgtggctgtcaaattgcgttgaagagaaggtaatacgcggcgctacaccctgttgacattttattttcaacggcatctgagtttgattagttactgcgtcataaatctgacccggggttaaattaattattttatccgcaccaatttcattcagtctaatttcagcggtgttcgtacccaaaaattgacaggtagtaccaaccacctttccgttaatattcagaacgcctgaatcatactcatcaacagcaaaagccccagcgctcataaatacagcagacaatacagaagcagcaataagtgaacgtttcataatctcttccttaatgaagtaatttctatttgttaagagttattaacccttgcaacgaaaattctcatagacaggaagttatcgcaatgtaaacacgatgttttgttgatttaaaacaatttacagattgcaatataattgcaacaaataatcattgcttatcattattttgtaaacttattaatttccgaaatttactgcccttaaatataaacacaacaaataaaaaagcccatatcattgatatcaatgatatgggcctgcggaattaataagaattagtcgtaatgattaacaacaatctgtcgggtgctatcaccaggcaccgtgtatagctgcgttgtcacacctctcatcggcgtagcggcgggtgtttgcagagttgaaacgtggatagtgttgccgcaacgctgctgcaactgtgcgtttaccacttctgtactgcacgttggcgcggtcacttttccactgatggttaatgttgcggtgtcggaggcaaaaacaggtacgcttatcccataagccgaaactataattcccatcagcaaatattttttcatagtgagtaattgttcctctggtgaacgtcaaacagtatgcaggccgtcctgatgagcagtatgaacgtatcgataccttaaaaccaattgaaaaaataaatcagtaggataggtatgatcaattcaaataatgtttttgccgattatttcagataaacacctgtctgtttaagcaggaattaacaatgcgggggctattattttattaatacattcactgcatcaatatatattaatgcagtgaatgtcatattctctttggaatacgtcaggaggattacaccgcgcggaaggcgatttctcccggaatcacttcaccctgccagtaaagctgtgccgcaacgcgatcggccagttcgcgatagatcgcggtaaattcgctctccggacggctaaccaccgtcggcgtaccgcgatcaagatcttcgcgcagactaatatgcagcggcatctgacccagaagctgagtatggtatttttccgccagcttctgcgcgccgcccgtgccgaagatcggttcgtgatggccgcagttgctacaaatatgcatactcatattttccacaatgccgagcaccggcacttccaccttctcgaacatcacgataccttttttggcgtcgattagcgcgatatcctgcggcgtagtcaccaccaccgcgccggtaacaggaatgttctgcgccagcgttagctgaatatccccggttcccggcggcatatccagtaccagataatccagatccggccacagcgtctcctgcaacatctgcatcagcgccttactggccattgggccgcgccataccatcgcgttatcgtcagtcaccagatagccgatcgagttggtcgccaggccgtgagacataatcggcgccatatgcgtaccgtctggcgatgttgggcgctgatcttctgcgccaagcatggttgggatcgacggaccgtaaatatcggcatcgagaaccccgacctttgcgccttcagccgctaacgccagcgccaggtttaccgccgtggacgatttccccaccccgcctttaccggagctcacggcaatgatgtttttcacgccattaatgccaggctgatttttgacgcgtttcagcgtcgcaatgttgtacgacagtttccagtcgatcgcttttgcgcccgtaatacgtaacagatcggcgctgcattgctcttttaatacctcaaacgcgctgttccagacgaacggcatgaccagctcaacgtgcagcgtatcatccatccaggcgacgtggtgcaacgccttaagcgtggtgaggttatgcttcagggttgggtgctgaaaattcgccagcgtcccggcgaccatcgctcgcagggtatctggtgatttggcctgggattgttcgttcatcccgactccttttgtagttctgaaaagtacgattgtaactttgtagtttactccagcggtaacaattattcatttacggataaatgcccttatcgattggcgcagtaattaccattttggtactatcaaagcccttttttacaacagaagaagtaatacccactatgactcaagtcgcgaagaaaattctggtaacgtgcgcgctgccgtacgccaacggctctatccacctcggccatatgctggagcacatccaggctgatgtctgggtccgttaccagcgaatgcgcggccatgaggttaacttcatctgtgccgatgacgctcatggcacgccgatcatgctgaaagcgcagcagcttggtattacgccggagcaaatgatcggtgaaatgagccaggagcaccagaccgatttcgccggttttaatattagctacgacaactaccactcaacgcacagcgacgagaatcgcgagctgtccgagctgatttatacgcgcctgaaagagaacggttttattaagaaccgcaccatctctcaactctacgatccggaaaaaggcatgttcctgccggaccgatttgtgaaaggcacctgcccgaaatgtaaatccgcagaccagtacggcgataactgtgaagtgtgcggcgcgacctacagcccgaccgaacttatcgaaccgaaatccgtggtgtccggcgcgacgccggtaatgcgtgactccgagcactttttctttgacctgccgtcattcagcgaaatgttgcaggcgtggacccgcagcggcgcgctgcaggagcaggtggcgaacaaaatgcaggagtggtttgaatccggcctgcaacagtgggacatttcccgcgacgcgccgtattttggtttcgaaatcccgaacgcgccgggcaaatatttctacgtctggctggacgcgccgattggctatatgggctccttcaaaaatctgtgcgataagcgcggtgacacgaccagttttgatgagtactggaaaaaagactccgatgccgagctgtaccactttatcggcaaagacatcgtctatttccacagcctgttctggcctgccatgctggaaggcagccacttccgtaagccgaccaacctgttcgttcacggttacgtgacggtgaacggcgcgaagatgtctaagtctcgcggcacctttattaaggccagcacctggctgaaacactttgacgccgacagcctgcgctactactacaccgcgaagctttcttcacgcattgatgacatcgacctgaacctggaagactttgtccagcgcgtcaatgccgatatcgtcaataaagtagtcaacctggcctcgcgtaacgccggttttatcaataagcgtttcgacggcgtgctggcggctgaactggccgatccgcaattgtataaaacctttactgacgccgctgcggtgattggcgaagcatgggaaagccgtgaattcggtaaagctatccgtgagattatggcgctggccgacatcgctaaccgttatgttgacgagcaagcgccgtgggtggtggctaaacaagaaggccgcgacgcggacctgcaggccatttgctcaatgggcatcaacctgttccgcgtgctgatgacgtatctgaaaccggtactgccgacgctttctgaacgcgttgaagccttcctgaacagtgagttgaactgggatgccatcgaacagccgctgctcggtcacaaggtcaacacctttaaggcgctctacaatcgcatcgacatgaagcaagttgaagcgctggttgaatcgtctaaagaagaggtgaaagccgcagccgcgccggttaccggcccgttagccgacttcccgattcaggaaaccatcacctttgacgatttcgccaaaattgacctgcgcgtagcattgattgaaaatgctgagttcgtagatggttctgacaaattgctgcgtctgacgctggatctgggcggcgagaagcgtaacgtcttctccggcattcgttccgcctacccggacccgcaggcgctgattggccgccagacggtaatggtcgccaacctcgcgccgcgcaaaatgcgctttggcgtctccgagggaatggtgatggccgcaggacctggcgggaaagatatcttcctgttaagccctgatgacggcgcgaagcctggccaacaggtgaaataagcaacaagccggagcatgctccggcttttttaaccgcttaatcctgactggcatatcaccccatccgcgtgttttaactttttccttaataagcaatagcgttaagactccatatccggactgctaaataacggctaaaagtcatattctatctctccctgatacattgctattactgggttaaattaattcattgaaattattttaaaaacccaatcattatataaaatggagttttagatgaaaatttctggcaagttattgtccgcggctttggcttccgtactggtgttctctcttgctggctgtggcgataaagaagaatcaaagacctttaacgcaaacctggcggggacagaaatttcaattacttacacctataaaggtgacaaaatcattaagcagacgtctgaaagtaaaatcagctatgccactgtaggcgctaaaacgaaagaagatgccgccaaaattctcgatccgctgagcgcgaaatataaaaatatcgccggagtggaagaaaaattaacctatgaagatacctatgcccaggaaaacgtctctgtggatatggaaaaagtggactttaaagcgttacagcaaatctcagggacgatggtgtccggcgataccagcaaaggtatcagcatgaaacaaacccagacgctgctggaagctgctggttttaaagaagcgaaataactggcaggcataatgtattgcatcgactggtaaagtcgctcagggcgctgcttcggcagcgtcttttctttatgaattccgaaaaaagacagcctcgctgtaagtcccctcgccaaagcctataatccctgaattcttggccacaccaatacttaacgacaaggaattgttatgcaggttctacgtcttatggcactgccactattcgcgctctctctatcggttagcataactggctgcgatcagaaaaacgatactctccagggaaagcaaaataacatgacagcgtttatcaagaagatagccgctagcaaagagtcagaggaaacacaacgctatgtaggtaatctcaacggtattgaaatcaagttaacctattactacaaaggggatatcgttttacgtcaaatatctgaacataaactactttataagaccctgaaagccaataataaagaagaagcacaaaaaatgctgagtcaagtcggcgaagcttatcagggtatgccgggtttgactgaacgaatcgactattatgatagctatgctacggaatatgtggatattaattttacccaggcaaaaataagcgacctctgtaaattgccaggatcatcaattgacaactgttccgcgtactatctgtcaatgattcgctcgcagaaactgctggaagagagcggatatcatagaatcaattagtataataatgcgttttcccggtcagacaggacgctgccgggaacaataccgcagaattacttcgccgcgtgttcacgggctgccagaccgcgcagaaaataacgcataaactgatcgccgcattcgcggaagttcttatggtccggcgcgcgcatcatcgcggtgatctctggcattgagacacgaaacaactgaccggtaagtatcgccaggatatcatctgtttttagcgaaaaggcgatacgcagctttttcagcacaatattgttgttgatacgacgttccgccgtcaatgcaggcgccgcctcatctttgccgcgtttttcataaatgaggccattgagaaatgaggacaacacgatatccgggcaacgctgaaacccctcttcctcttctttgcgcaaccagattgcaatctgctccggcgtagcatcaacgttacccagcgccaggatacgcgccagatcggtattattagcttttaaaatgtagcgcacgctacgcagaatatcgttactcagcatgaggccttcggtcgtttctatggcaaaacgatattctaacagtcttttacaggccaatcgcctcttttaaacttttcagatagcgacggcttaccggcaccgtcaggccgttgcgtaaaatcagctctgcctgcccattatcctccagccgtatttcctgcaaatgggccatattcaccagaaactgacgatgacaacgcagtagcggcgtccggctttccagcgtgcgcagcgtcagctcggtaaacccctctttcccttcactgctggtcacataaacgccgctcatacggctactgacaaaggcgacatcatccatttgcaacaaatagatccggctgtgtccggtacagggaatgaatttaagcgcctgctggttttccggcaacaacgaaacatcctgtttactgcgctcctgacgcagacgatgtaacgttttttccagccgtttctcctctatcggcttgagcagataatcaaaagcgtgttcttcaaaggctttgatggcgtattcgtcaaacgcggttaaaaaaacgatatacgggcggtgttccggatcaagcattcctaccatctccagtccactgatacgcggcatctgaatatccagaaacagcacatcaggtcgcaacttatgtaccgcgccaatcgcttctaccgcgttcgcgcactctcccacaatctcaatgtcatcctgcccctggagcaaaatccgcagattttcccgcgctaacggctcatcatccacaatcagcactttaatcatgcgtcctcctccagtggaagtcgtaatgtaattcgggtaaaacagtccggctcgcaggccacgctaataccataatcatcgccaaagtgttcgcgcagacgtttatcaaccagactcatccccagcccgctactgccggcggaaggctgatacagtcccgcattatcctcaatatctaacatcaaatgctgcccttcgcgccgggcgcgaatagcgacgttgccggtatcaagcagttgcgacgtgccatgtttaatggcgttctcaacaatcggctgtaatgtaaacgcaggcaatttctgacgtgaaagcgtcgatggaacatcaagctgtacctgcagacgcgactgaaaacgcgctttttcaatttgcagataagcgtttacgtgttcaatttcatccgccagcgtgacgatttccgacgggcgttttaaatttttgcgaaaaaaggtcgacaagtactgcaccagttggctggcctgttcgctgtcgcggcgaatcaccgctttaatggtattgagcgcgttaaacagaaaatgcgggttcacctgcgcgtgcaacagcttgatctctgactgcgtcagcaacgccttctgccgttcatactgcccggccaggatctgcgcggataaaagctgcgcaataccctctcccagggtgcggttaattgagctgaacagtcggtttttcgcttcgtacaatttaatggtgcccatgactcgctgattttcgccacgcagcgggatcaccagcgtcgaaccgagtttacactgcgggtgtagcgaacagcgatacggcacttcgttgccatcggcataaaccacctctccggtttcaattgctttcagcgtataacctgatgaaatgggtttgcccggtagatggtgatcgtcgccaataccagtaaaagccagcagtttttcgcgatcggtgatggcgacggcgccaatatccagctcctgatataacacctgcgccaccttcatactgttcacttcgttaaatccctgacgcagaatcccctccgttgacgcggcgaccttcagcgcggtagcagaaaatgccgaagtatatttttcgaacatggcgcgcttatcgagcaaaatacgcatgaacagcgcggcgccaacggtattcgtcaccatcatcggcgcggcaatattactgaccagatgcaaggcatcgtcaaacggcctggctatcagtaaaatgatcagcatctgcaccagttcggcaatacacgtaattgctcccgccgtcagcgggctaaacactttgtccgggcgtccgcgacgtatgagaacgctgtgtaccaacccgcccaacagcccttcgacgatggtggaaatcatacagctcagcgccgtcatgccgcccatagaataccgatgtaacccaccggtcagaccgaccagcccgccgacgaccggcccgccgagtaggccgcccatcaccgcgccaattgcgcgggtattggcaatcgaatcttcgatatgcagcccaaaataagtgcccatgatgcagaagatagaaaacgtgacgtaacacagaagcttgtgcggcagacgaaccgtgacctgcataagcgggatgaacaggcgcgttttactcattagccacgcaatgaccagaaacacgcacatctgctgaagcagcagcaacaccagattaaactcgtacatacccgcaaaccacacttcaattaaaagcgcgtaacatacattgagtacaattaactttctttgaactgttgcataaaaatatgaattcgtgaatacgatcacttaaacgccgcgccgcaacccgctacttcgcgttttaatgcataaaaaacaggcaaaacttcctggttcctaaaagagcgtctaaagttaaaccgggacctcgcgagcaagggtgaaacgatggcgctttacacaattggtgaagtggctttgctttgtgatatcaatcctgtcacgttgcgcgcgtggcagagacgttatggacttttaaaaccacagcgaacggatggcggtcatcgtctgtttaacgatgccgatatcgacagaatccgcgaaatcaagcgctggatagataacggcgtccaggtcagcaaagtcaaagtgctgctcagtagcgacagtagcgaacaacctaacggctggcgcgaacagcaggagatcctgctgcactacctgcaaagcagtaatctgcacagtttacggttatgggtcaaagaacgcggtcaggattatcctgcccaaacattgaccactaacctgttcgtcccactgcggcgacgattacagtgccaacaacccgcccttcaggcgctgctcggcattcttgacggtatcctgatcaactatattgcgctctgcctggcgtctgcgcgtaagaaacagggaaaagatgcgttggtgatcggctggaatatccatgataccacccgcctgtggctggaaggttgggtcgccagccaacagggatggcgaatcgacgtgctggcgcattcgcttagccagttccgcccggaactgtttgacggcaagacgttactggtatggtgcggagaaaaccagacgctggcgcagcagcagcaactcctggcatggcgcgcccagggacgcgacattcatccccttggcgtttaaacagaagctaacaaattcgctttaatgtatactccttttattaacataaggagtacataatgcgcgtagcgaaaatcggggtgatcgcccttttcctgctgatggctattggcggtatcggcggcgtgatgctggcaggttacagttttattttgcgtgccgggtaagcacgcgcgtcagcctttcaaacaggcgatcgataatgatcgccgccagcgccaccagcagcgccccctggataacataggccgtattaaagccgctaagcccgataatgatcggcgtgcctaacgtactggcccccaccgttgaagcgatggtcgccgtaccaatattgataatcaccgaggttcggatgcccgccagaatcaccggcgcggccagcggcagctcaacctgatacaactgttggcgacggctcattcccataccgctggcaacgctcatcacgctggcaggcaccgcgcccagcccggccagggtcgcctgcaggatgggcaacaccccatacaggatcaaggcgataatggccggttgctgaccaaaacccatgacgggtaccgcgatcgccagtaccgcgaccgggggaaaggtctgcccgacggcggcgatagtctccaccaggggacgaaactctttcccactttctcgcgtgaccgcaatccctgcgccgacgcccaccacgacggcaaacaaacttgagatgcccaccaaccagaaatgggcgagcgcgagggcggcaaaactctcctgttggtagaccgggcgcggtaaatcgggaaacagcgcggcgaagaacggctggctataaggcaatccaaacagcagaagcaagaacagaacaataagccagagaagcggatcacacagtcgtttcacggggggacgtctccgaaagcagatcgcggaaatggagcgtaccgcagggctcgccctgctgattcgccaccggcaggacgtcgcaccgacgggcgacaaacatcgatagcgcatcgcgtagcgtcatctcttccaccagcgcgtcgccgctgagctgttcatgccgacgtacataatcgcctacgctacgtaacgaaagcagccttacgcccagctcgctgcggccaaaaaatgcctgcacgaaatcattttccggcgaggtcagcatagaaagcggcgatccctgttggataacgtggcccccgtccatcagcaccagatggtcggcgaggcgtagcgcctcgtcgatgtcgtgcgtcaccagtacgatggtgcgccccagcagctgatgaatgcgggtcatctcctgctgcaatgcgccgcgcgttaccggatcaagcgcgccgaaaggctcgtccatcagcaatacctgcggatcggcagccagcgcccgcgcaacgccgacccgctgctgttgcccgccggaaagctgatgcggatagcgatcgcgcagcgcgctttccagacccaataatgccatcagttcatcaatacgatcgttaatccgcgcacgcgaccacttttgtagttgcggtacggtggcgatattttgcgccaccgtccagtggggaaaaaggccgatagactgaatggcatagcccatgcgacggcgcagttcaagcaccggcaggctgcggatctcttccccggcaaaacggatcgttccgctatcatgctctaccagccggttaatcatcttcagagtggtcgattttcccgagccggaggtgccaattaacaccgaaaagctgccttcgctaaaatgcaaattgaggtcgctaacagcctgttgatcgccgaaggttttactgacatggttaaattcaatcatcggttgctcccttcagaaacgcgatccataaatcaaacagcgcgtcgatcactaccgccaacgcaatcaccggaatgacgcccaacaggactaaatcaatggcgctgctcaatagcccctgaaacaccagcgcgccgaaacctcccgcgccaatcagcgcggcgacgacggccattcccactgtctggaccattactacccgcaggctacgtaaaaagaccggcagcgccagcggcagttgcacatgcctgaagcgctggccgctactcattcccatggctcttgcgctctccagcacatcgcgcggcacctgattgagcccggcgaccacgccgcgcaccagcggcaataacgcatagagcaccagagctatcagcgcaggcgtcatgccggttcccgcgacgccgaatgcggcaagccacggaaactgtttcaccagcccggccaacggcgcgatcagcaggccaaacagcgcgacggaagggatagtctggatcacattcagtacggtaaacaccggcccctggcgcgaggcggaaaaataacaccagacgcccaacggtaatccgatcgccagcgccggcagcaccgtgcccgccagtaacatcaaatgttgcaccagcgcggcatcgaaaacatcctggcggttggtatactctttcagaagcgagaggttgtcgaacgtgcctgaaaacagcagcgccagcgggacaatgacaatttgcgcgtgcagcaaccagcgccacagcggcccagtggtaatacggcggatcgcatcgctacaggccagcaacatcagaccgaggcccagccacaatccacttcccagactggtacgcgccagcgggctgccctcctgcgccaactgggtcgccgccctgccgactccccacagcatgacaataaaaagcgtctgcgccatcatcagcgtcagtacgctaccgcgtttaccgggtacaaagcacagcgtaaacagcgcgcatcccgcgccagtcagcatccagatggtcgccggccagatctcccataactggcgcccctcgccgctcaccagacgattcggggcgtaattaatgaaaggcagcgcgacagcaagcaaggtcagaacaaccaacagcaacagcacacgattaaccgtgatttttttggcagcatcactcacagattacttcacccaccctttttgtcggaggtaatctgcggcgacttttttcgcatccagcccttctacggcgattctggcgttcaactgttgcagcgttttctcatcaaggctggcgaaaacgggctgcagccagtcggctatctgcggataggcctgtaacaccgattcacgcactaccggcgcgggggcatagataggctggacgccttttgggtcgctcagggtttgcagacccagcgcggcgacagggccgtcggtgccatacgccatcgcggcgttaacgccggatgtttgttgcgcggcggctttgatcgtgaccgccgtatcgccgcccgccagcgacaagagctggttctgattcaaggtaaaatcataggctttttcaaatgccggcagcgcatccgcccgttcgataaattccgcagacgccgccagtttaaaagtgccgccctctttcagataacggctgagatcggcaagcgaggagagtttatttttttccgcgatgtcctgacgtatcgcgatggtccaggtgttgttggccggcgcaggcgtcaaccagaccagcttattctgctccgcatccagttttttgactttctcaaagccttgctttgcatttttccatgccggatcgttttcatctttaaaaaagaacgccccgttaccggtgtattccggatagatatccagctctccggcggtaatcgcgccacgaacgactggcgtcgtcccgagctgaattttattgaccgttttaacgccgtggctttccagtacctgcaaaatcatgttgccaagcagtgcgccttcggtatcaatctttgacccgaccgtcacgggcgatgccgcctgtagaggtaaactcaccgtcgccagcaacgccagcgaacttacccatagctttgagatcgtcatgatgctttcctcatccttttacggcctttttcagagacttgagaaaaaagcatagttgaaaagtctgcgtttaacctgggattttccgccagtttaagtgacgtggcaggcaataaaaggggggacaggaaaagtcattgccagacagggcgctgctatcgcgccctgttgacggcaggcttacagtagctcgaacgatccttgtttaacgcgagcggaatccacgccgataaagacgttgaacttgccgggttccgcgtcatatttcatctgctgattccagaacttcaacgcctcgatatcaatcgggaaactcacggttttacgttcgccgggcttgagggtgattttttcaaagccttttaattgcttcaccgggcggctcattgacgccgtgacatcctgtaagtacatctggatgaccgtagccccttcgcgtttaccggtgttcgtgacctctacgctggccgtgactttgccgtcgcgttgcattgtcggtgaggagagcgtgacgtcagacaccgtaaatgtggtgtagctcagaccgtaaccaaacggatagagcgggccattcgcttcgtcaaaataacgtgaggtgtatttgtttggcttttcaggattatacgggcgtcccgtattgagatggctgtaatagaccggaatttgtcccaccgaacgcgggaaggagatcggcagtttgcctgacgggttgtaatcgccaaacagcacatcggcaatggcgttgccgccttccgtcccggcaaaccaggtctccagaatcgcatcggcctgttgatcttcttttaccagcgccagcggtctgccgttcattaataccagtaccagcggcttaccggtggctttcagagcggtgattaagtcgcgctgactctgcggaatggtgatattggtacggctggaggcttcatgcgccatcccctgcgactcgcctaccactgcgaccaccacatcggcctgtttcgccgcctgtacggcctcatcaatcatcgcctgcggtgagcgcggatcgattttcaccgcctcttcatacaggtttaagaaatcgacgatgcctttatcattagtgatattcgcccctttggcatagaggatcttcgccccgtcgccgacggcattttgaatacccgccagcaccgtcactgactgattcgcgaccccagcagcagaccagcttcccattacatcacgttgactgtcggccagcggcccaacaacggcaatggtgcccgattttttcagcggcagcgtttccagccggtttttcagcagtaccacactttcccgcgccacttcccgtgcctctttacgatgcaggcggctttcggcattggtgtccaccgggtcgctctctttcggccccagatggctataggggtcgttaaacaatcccatgtcatattttacgttgagcacatggcgcgtcgcgtcgtccagttccgccatcgtcactttgcccgacttaatcagacccggcagatatttgctgtaatactcatccgccatgctcatatccacccctgcctttagcgccacgcgcaccgcatcttccgggtcggccgcggtaccgtgtttaatcagttctttaatagcgccgtggtcggaaacggtaattcccttaaagccccactcatcgcgcaggacatctttcaatagccaggaatctgacgtcgcaggcgtgccgttcagcgagttcagcgccaccatcaccgcgccgctccccgcatccagccccgctttgtacggcggcatgtagtcattaaacagacgctgggaactcatatccacggtgttgtattctttaccgccttcaacggcgccataggcggcaaaatgtttcacgctggtcatcaccgaatagcggtccgccgggcttttgccctgcatcgctttcaccatggtttcgcccatgatagaggttaaatatgtatcttcgccaaagccttcggaggcgcgtccccaacgcggatcgcgggagacatccaccatcggcgcccaggtcatattcaggccgtcgtccgccgcttcatacgccgatacgcgtcctacggttcttaccgcatccagattaaaagaagaagccagaccgaggcttatcgggaagacggttcgctggccgtgtaccacgtcataggcaaaaaagagaggaattttcaggcggctcaacgccatcacctgatcctgcatttgacggatatcctggcgggtgacggtattgaaaatcgcccctacctgcccgtctttgatcatctcgcgaatcgcttctttcgggttatcagggccgacgctaatcagacgtaactgaccaattttttcatcaacagtcattttcttgagtaaatccgtgacgaacgcgtcgcgcgcttcgggcgtcagcgggtgattgccaaacaggttttccgccaatgctggctgcatcgccagactcacagcaacacctactgaacataaccatttcatgttgagtctctctttatctttatcccgacgaggcggtaaaaacagaataaaaaccgcagtttgccataagcctaaacgcgagaggagaagaaagcgaaggttattctcctaattttccgcacagtcgaatacacaaccgccagcaaatggtatcaaggcggcaaatgaataccaccaacacagaaacaatttgaatgagaaagcgtattgtcatacaaagcgctatgcttaacgctgatattttgtcccaccacaaggagtggagaatgtcttccataacaatgactgataataaaacgttcctgaatgagctggcccgcctggtaggccattctcacctgctgacagaccccgccaaaaccgcccgctatcgcaagggtttccgttccggtcagggcgacgcgctggccgttgttttcccgggttcattactggaactgtggcgtgtgctcaacgcctgcgttaacgctgacaaaattattctgatgcaggccgccaacaccggtctgacggaaggctccacgccgaacggcaacgactacgatcgcgatattgtgattatcagcacccagcggctggataagctgcacttactggataacggccaacaggttctggcctggcccggtacgacgctctatgcgctggaaaaagcgcttaaaccgctgggccgtgaaccgcactcggtgattggttcgtcgtgtatcggcgcgtcggtcatcggcggtatctgtaataactccggcggctcgctggtgcagcgcggcccggcctataccgagatgtcgctctttgcccgtattgacgaccaaggcaaactgcaactggtcaatcatctgggtatcgatcttgggcatacgccggagcagatcctgagcaagctggatgatgaacggattaaagatgaggatgtgcgtcacgatggtcgtcatgcgcacgatcacgactacgtgacgcgggtacgagatatcaacgccgatacgcccgcccgctataacgccgacccggaccgtttgtttgaatcttccggctgcgccggaaaactggcggtttttgccgttcgccttgatacctttgcagcggaaaaaaatcagcaggttttttatatcggcaccaatcagcccgcggtactgactgaaatccgtcggcatattctggcgaacttcgacaatctgccagtggcgggagaatatatgcatcgcgatatctacgatattgcggagcagtacggtaaagatacctttctgatgatcgataaactcggcaccgacaagatgccattctttttcacgctaaaaggccgaaccgatgcgatgctggaaaaagtaaaatttttccgtccgcatttcaccgaccgcgcgatgcagaaattcggccatctgtttcccagccatctgccgccgcgaatgaaaaactggcgcgataaatatgagcatcatctgctgttaaaaatggcgggagacggcgtcgcagaagcgcaacgctggctgaatgaattttttaaatccgctgagggcggtttcttcacctgtacgccggaagaaggcagcaaagccttcctgcaccgcttcgccgctgctggcgcagcgattcgttatcaggccgtacacgctgatgaagtggaagatatcctggcgctggatatcgccctgcgccgcaacgataccgactggttcgagcatctgccgccggaaatcgacagccaactggtacataaactctattacggtcactttatgtgccacgtttttcatcaggactatatcgtgaagaaaggcgtcgacgtccatgcgctgaaagcgcaaatgctcgagttgttgcaggcgcgcggggcacaatacccggcggagcacaacgttggacatctgtataaagcgccggaaacgctgacgcgtttttatcggcaaaatgacccgaccaacagtatgaaccccggtatcggcaaaacgagtaagcggaaattctggcaggaaaatacgcccgacgaaacgcattaacaccgtgcggtttaccgtgaagcccggcggcgcgatgcctgccgggcctgcggcgacttaatcgttctgtgcggtttgcgctccggcactggcgctggctgccgccatttgcgcggctttttgctttttatagctcagcgcggcagccggaacgggcatgactttaccggtttcaatccatgtacgcaggcggctggcgtccgcaaagtgggtatatttgccgaacgcgtccatgaccaccagcgcgaccggtttgttattgatcacggtacgcatcaccaggcaatgccccgccgcattggtaaatccggttttcgttaactggatattccagttatcacggtagaccaaatggttggtattgcgaaacggcagcgtatacgccggatgcgagaatgtcgccatgtcttcgcgcgtggtgcttagctggccaatcagcgggtattgcttcgtggcaatcagcaattttgttaaatcccgcgcggtcgagacgttatgaatcgacagccccgtaggctcaacgaagcgggtatgcgtcatgcccagcgctttcgccttcgcattcatcgctttaataaatgcgttataaccgccaggataatagtgcgccaggcttgccgccgcacggttttcggatgacatcaacgccagcagcaacatatttttgcggctaatttcgctgttcaggcgcacgcgggagtaaacccctttcatttccggcgtctggctgatatcgaccttcagtatttcatccagcggcaatcgcgcgtcgagcacgaccatcgctgtcattaatttggttatcgaggcaatcggacgcaccagatccgggtggttcgaatagatcactttattggtgttgagatcaacaatcattgcgctaccggaggcaatctcaggttgagacgccgcggttgtcgctgccgttttcgccacagcctgcggggcaaaaggtacggccaacatcagagcaaggctcaggaatgaagctcggaatttcagcatgatgagatttctgataatgattcacgcgcgtcgtaacgcacaccgcctgagctaagattatactcaagctagcagtggcatcatagcggcacgccagcgttgccgctacagaagaatcgtcagcaaatgctgcattgctggcttttgcgccagccctttttctcatcagaacaggcggtagccgtatccccacaggatcacggtgatcgccagtagcacctccaggaccagcacgccgatagcgagcgtcgaactggagaagcttaatccttcctctctattaatgttaaggaaagtcggaatacccaaatacagcaaatagccggtgtaaaaaagcgcgacagcgccgaccagtgcgcatagccataccaggggatagagcgccaccagaccacttaaaaacagcggcgtcgcgacatagccggcaaaaaccatacagcgcgcaagcgatggccgttgcggatagtttcgcgccatccaccagatgacgcgtcccatcaccgcgacgcccgccagcatcacgccgtagaacaagaccgccagcgcaaaagcggtaaacagcgagagttgtaacacgttgccgtcgccaaaattccagccgatttgcgtcgtgccgataaaggcgcagacgacgggaatcgccgccatcagcaaaacatggtgcgtatagtgatgcgaaacagtttcgttttcgcttttgatcacctgcatttcccgatcgggatgggaaaaaagcccccatacatggttcatactgcccccttctgctgcctcagatgccagtatgttcaagtataattcagtttctggttattttatgaacaatggcaaaatagtctccggcaaaacgtcggctttgccgcgcacgcctcttgccagggtgtatgcttaatgccggaggtggtttacgcatggatatcaacacgcttattacgcattatggctatgcggcgctggttatcggcagtatggccgaaggtgaaaccgttaccctgttggggggcgtcgcggcgcatcagggattgctcaagtttccgctggtggcggcggctgtcgcgctgggagggatgatgggcgatcagctactttatctgttaggacgatgctatggcgggaagatcctgcgtcgtttcccccgttatcatacgaagattcgtcgcgcgcagaaaatgatccaacgccatccgtatctgtttgtgatcggcacgcgttttatgtacggcttccgggtggttggcccgctgctgattggcgccagccgcctgccgcctaaaatttttctgccgctgaatattgtaggcgcgctgatctgggcgctgctgtttaccacgctgggatatcttggcggcgaggtgatcgcgccatggctgcacgacctcgatcagcatctcaggcacggggtctggctgattctggccatcgtcctggtggtgggcgtgcgctggtggctgaaaagacgcggcaaagcggaggcccgttaaacccgatggtatccggatggcataacgccgccatccggcacccggcgtttattttgcgttgaattgcggattcgccagcataaacccgccgtcgacaatcagcgactgaccggtggtgtagcttgctccttccgaacacagccaggcgacgaggctggctatttcatgcgtagaacctggtcgggcgatagggattgagggttccgatcccggctcaatgtcgctgtcatccatatcattcatcggcgtggcgatagcgcctggcgcgacggcgttgaccaaaatatgatgctcaatcagttccagcgccatggatttagtcaatccccccaacgcatgtttcgccgcggtataggcgctggcttgcggaagcggcgtatgctcatggacggaggtgatgttgataatgcgccctccctctccttgtttaatcatatgccgggcggcgatctgcgcgcagagaaacgcgccatcgacgtccacggtaaaaatttgccgccactgcgtaaacggcatatcaataaacgcggatttggtcatcgccccggcattattgaccagcacgtcaacgcgccccaggcgctgaataagatgttcaatggcctgcgcgccctcgggtaactggctcaggtcaagatgaatggtctctgcccgcacaccaaactgcgccgctttttttgccgtctcctgcgcgccgcgttcatcggaatgccaggtgataccaatatcaaaaccgttttgtgctaataacaacgcacacgctttgccaattcccgaatctgatgccgttacaattgcgactttggtcatattcctctccggatgaatcatacacagcctaagtataggaaccctgtctgaatcatccggaaaaatcaggaatgataaccgccgcccagcgcgctggtaagctgaatagaggcatccagccactggccctgcaacagcaagccgttacactgctcgcgcagtgccgggattttggcctcgctcacgcgggaacccgcaataataccggcattaaagcgcgcttgcgccagaccgaccacacgctgcgcgtcatgctcaatctgctgctgatgctgatttttctgcgccagcgtctctacctgactggcggcgcgcgccacatcattaaccgcatctaccaccgctttgttgtagttggcgatagaaaggttgctttgcgctttggcgatatcgaggttggcattcagcctgccgctgtcgaaaatcggcagcgtcagcccgccggtaatgccatattgctgtgcggaatggcggaacagatcgctcagatgtaacgcatcctgctgtaaaaaagccatcagattgatatcgggataaaacgcggccttcgcggcgtcaatgctgctcaacgaggattcaatgtaccagtgcgcggcctgtagatccgcccggcgcgccagcaacgaatagcccagttgcgacggtaactggctttcaacggcggggagactcacctgacgcagcttgagcgccgccgattgcgtattggttaacgcgctgagccgcgcttcaataaccttcattttaccgttaacgtcattcaactgctgctgggttttgctggcgtcgatatcggtctcgaccccttcaacagaagaagtaataccgtgttgatacagctcccggtttaccgccaccacgttttgctgctcatgctcgatttgcatcagcacatttttcagcgctgcctgtgtttgccactcccagtagagtcgcgccacgccgcttgccagcaattgtcgggtctgctcctgctccgcttcgcgcgctttgaccgccccgatccgcgcagtaacttcagcgcggtttttcccccataaatccagatcccagcccgccgtcaggccgaatgtaccgttggtataccacggcccggtcgttcccgccgcagggtcggtaatcgcgaatggccccatcagcccttccgcggacattcgctggcgctcaatgtcggcagaaaagtcgagctgcgggccgtcctgcgcctcaaccgctttcgcctgcgcttccgccagttgaatacgctgttcagccacctgcatatccggcgaatgctgtatggcattatcgatcagcgcgtcaagctgcgcatcgtgatacgccttccaccactggctatccggccaaccgtttttcaatgccgccggcaggctggaatcaacatgagaagagggcgtctgctgggtcagcgactggcgggtatcgtgcatgggggcgcaacccgccagcaaaataaaaagcggtaagctcgctgtcgcggcaaggaaagaattacgattcatggaggtgttctgataaaaaaaggtgcgcagagagtacgtcttacggcgatctattttttagttacgcgtggcaatacatcatcagacaacaaaagacatattttgaaatttatatgattagtaaataatttcatctgatacattttttgatgtaatacttcaatgaaaagtcccactaacccgttcataaatgaacgattttgctgcaatacgcgccagcagccttcatgagttaaacgtcgccgcgcccaacaaagcagcagatggcttaatactttcctatactttgtttgtatttaccaataaagggacaaacaatgaaaattcttctatgggcaatcttaattatttttctgattgggctgttggtggtaacgggcgtgtttaagatgattttctgattcctgcgccgggcagcgatagtatctgcccggcacacgttctggacgctgtagagattagattttaatagcctgaatcgcccgcgcaatctcggacgaacggtttaacgcccgaatcgactgaaagagttccgtcgcctcaatatattccttacgtaaatatcccagccactgtttaatacgcgcgacatgatataaaccggtatcgccctgcttttccagtcgggtatatttttgtaataacgtcaccacttccggccacggcatacgcggctcgttatacttcaccacccggctcaggttaggaatatttaacgccccacggccaatcatcaccgcatcgcagccgctggtcgccatacatgcctgcgcgctctgccagtccaagatttcgccattcgcgataaccggaatagtcagacgctggcgtatttcgccgatcgcctgccagtcgatatgctcggcgcggtagccctgcgctttggtacgaccatgcaccaccagttcactggcgccagcctgctgcaccgcatcggcgatttcaaattttctatcgccgctatcccagccgagacgcacttttaccgtcaccggaagatgcgacggtaccgcggcccgcatcgctttcgcgccctgatagatgagttcgggatctttgagcaatgtcgcgccgccgccgctgccgttcaccacttttgacggacagccgcagttcaggtccacgccatacgatcccaacgccgtcgcccgcgcggcgttttccgccagccactgcggatgctggcccagaagctgaatacgcaccggcgtgccggacggcgtgcggctggcgtgatgcaactccgggcagatgcgatgaaacacttttaccggcagcagctgatccaccacgcgcacaaattcggtgatgcagagatcgtaatcattcacttcggtcagcagctcgcgcactaacgcgtcgagcacgccttccatcggcgccagtaaaacacgcatatcggtatccacagcaaaaaaagaggcgctatcataacgcctctctgcgatgagcaaaactttttgccgggtggcggcgcaaacgccacgctacgtcacgtaaagtgctcaacgcggctcaagacagttatcttctttccagccgtacagccattcgataccgcgataaaacgcctcctgcgatttccctttccacaacagattacgcacctgacgctccaccccggcggcgtgatagagacgccccatctcgcgggtagaccagacgatacgcgccgtgcggggaatacgcaccgactcatacagcgcaaatgcctgctgcgcgtcgccgtcgcagcgttccagcgctttgcctagcgtgacggcgtcttccagcgccatacaggcgccctgggccatatattgcgccaccggatgcgcggcgtcgcccaccagagtgatacgctcggttccccattttgcgaccggctcgcgatcggcggtcgaccagcggcgccaggaggtcggcttatccagcatctggcgcgggcggggatgaatgccggcaaaataagagagcacctcttctttactgccgtctttcacgccccactcttcttgctggcggctgtggaatgtcaccaccagattgtactgttgacctccgcgtagcggataatggaccaggtgacaatgcgggcctgcccacagcaccggtgcgttaatacgtaaatcgtccggcatatcgtcgcaatcaatcaccgcccgatagactacatgccccgttacgcgcggcgcgtcgccgagtaaactttgccgcacgaccgatttaacgccgtcgcagcccacgagaatatccgccgtccagctatttccctgctcatcaaacaccgtaacgtcatccggcgtctggcggatatcgacaatatgggtcgaggtacgatactccacgccagggtgcgtcagcaccgcttcccataccgttgcatgaatatctacccggtgaattaccgcatacggcccgccaaaatggtcgcggaacgcctgtccggtttcaatgcataccacttcttcggcattcacggcatccatcatggtaatgtgatcggtaaacaccgcacgctggcgggcaacatcgcccacaccgagactatccagcgccgaaaaagcgttcggcccaagctgaatacccgcgccaatctcgccaatttcgtgcgctttttccaacagcatgacttttattccctggcgcgccagcgacagcgcggtcgccgcgccgccgattccgccacctacaataattgcgcttgtcacgtgagtcatggtcattctccttttcaggccgggattttatcttgttgattttccggcgcggcggcaataaacgccggtagctgtacgcaggcgtcataaacggctttacagcgcggatagcctgataaatcgcagcccatcctgagcgcattcgcccactgaggaatcaggcagcagtccgcaaggcctggcgcgtcgcccacgcagaatcgtccggactgacttttacgcaatagctgctctaccgcgcttaacccttgctgtatccagtgggcgtaccagcgttttttatcctcttcgctaaccttcagctcatcggtcaggtagcgcaacacgcgcatgttattgattgggtgtatatcgcaggcgatagcgtagacaatttccagcgcctggctgcgcgccgggtcgctcgtcggcagcagcggcgtttgcggaaaatgtcggtccagccagtcgacgatggccagcgattgccccaacgattcgccgtcatcagtgaccagcgtcggcaccaggcctaccggattcatccgtcggtaggccagcgcattctgctggccgatacgaatattgacgcccaccgtctggtaatcaatcccctttaacgccagcgcaatacgtacacgataagacgccgaactattaaagaaactgtacagcttcatcgttcacctcagacaattttcacagcaatcggcgtcagaccttctacgttcccggtgatgacatcccctttcaccactgcgcccaccccctctggcgtaccggtgaaaattaaatcgcctggctgcaattcaaagaagccggacaaatagctgatggtttcattcaccgaccaaatcaggtgacgaatatcgctgcgttgatggtcttcgccgttaacctgtagccaaataggggcgttatccacattatgcgtttcagcggctttgtgtaatggcgcaatgggcgcggagagatcgaacgctttgccgatttcccacgggcgtcccatctgacgcatttccatctgacgatcgcgacgcgtcatgtccagaccggtggcgtatccccagacatattcatgggctttttccagcggaatatcgctcccctttttaccaatcgccaccaccagctcaatttcataatggtagttatcggtctgcgccggatacggcagttccagggtatcccccgccgctaccgggaccacagcgtccgctggtttacaaaagaagaacggcggttcgcgatcgggatcaaagcccatttcacgggcatgggcggcatagttgcgacccacgcagtaaacgcgacgtaccggaaactgctcatcactgcccgccacgggtactgttaccggggcctgcggctggaatacatatttggtcatgttctctctccctaattaataacgtgcttcgcggaacagccccagggcttcctgaaccggcttgtccgaaaaactgaataacaccgtgtcttcgctgctgcgaaacgacacctcatgccaggtcggcgccacaaaaatgtcttttgcggaaaaatgaaaagtttcgttgccgatagtgacctgccctgccccttcaacgacgtggtagatagtgctgtcggtgctccgcgccacacgcgaggcaaagccttttggcagcagttgcaggaacgcgcccatcgacggcatcggataaccgccggtgacgggattaacgtaacgcagcttgtagccttcccactcatccggatcgcccatacgggtcagatcgtgcaacgcctcgcgactgcggtcgtaacggtagttgaaaatcggcgacgagttcccgcgctggtggcgcagcggcagcatattcgctgcatagcgcggcagataatcgccctcttttcgcgtcaccggctgctgatcttcgggatagtcttccgcaaaaccacagcccaggagattgactaacggcagatccagaccatccagccataccaccggctctgatcccggattaccatgatcgtgccagcgccactgcggcgtcaggataaaatcgccggtatgcattggcgtgcgctcgccgtccaccgcggtaaatgcgcctttaccttcgacgataaaacgcagcgccgactggttatggcgatgactcggcgcgacttcgccgggcaggatcagctgtaaaccagcgtataaggtcgccgtgatcgacgactgaccgcgcaatgccggattttccagcaccagcacccggcggatcgcctctttcgcgccaatgacattgccgctttccatcagtagcggacgaatttcctgataattccagtaggccggcgcgcagttggcgtttggcgtctgcggtaccaggtgatgtaacgattcccacagcggcgtcagattctgcccggaaatatgctggtaatactgctgacggctatcttttacgttctgatttatttcagacatggagattctccttattcgtttacgacgctggcacgcggcaggtcgtcaggtacagaaatcgaaaggcggacaaccactgtcagcagggtaagcattaccgcgctgatagccgccggaatagcaatgacaaaaaacaacgtatcgaaagagaaattgagggccatcatcatgccgccggagagcgaaccgacaatcgccccgcagcgtccaatggcgttcgaccagctcacgcccgtcgcccgactttgggtggggtacagcgtcgccgtcagagcattcagcccgacctgggaaccgctaataccgatgccggtaccaaaaatcgccagcgccatcagccaaaggccgttttcgctcaggcctatcatgacaatgcaaactgcgcccagcgcatagctcaccgccagtacccggaacgggttaagccggtccatcaacacgccgagtaacagcgcgccaagcgtgccgccaacctggaatgcggcagtcacccacgacgcctgttgcagatcaatacctcgatggttaagtaacgtcggcatccagctggaaagcagatagataatgagcaggctcataaagaacaccacccataacatcagggtaatgacaagctgtcgcccggcaaaaagctggcgaatactgcctttggcgacggctgccgtctcatgcagaaagaattgcgtatcgtgatagcgctcgccggtaatggcgctgaccgtccgggcgacaacggcttgcggtagttggcgacgtacctgccagcggggagattccggcagcgcgaacagcaggccgaaaaacagcatcaaaggcaagatgccgcctagcgccagaattccgtgccagccaatcagcggcaccagttgcgcgctcacaatcccgcccatcgccgaccccagggtaaaaccgcagaacatcagcgtgaccagcgctccgcgtcgacgagcgggaaggtattccgacgtcatggtgatggtattcggcatcgctccgcccagtcccagaccggttaagaagcgcagcaacaccagggtttctatatccggcgagaaagcggaaagcaggctcaatgcgccgaatagcgccacgcaaagctcaatgacccgcttgcggccaaagcgatccgccagcggcccgcatagcagcgcgccggccgtaagccccagcagccctgcgccaaacagcggcgcaagttcgctggcgcttagctgccagtgggtacgaatatccggggcgatgaagccaatcgcggcggtgtcgaaaccgtcgagcataaccaccagaaaacagcagatgataacgcgccactgcattttgccgacgggcgcggcatcaataagggcttgtagatcacgtcgttgagtcatagctaatgcctcagtgcagggagatagatgttgtttttatgtttgctatgttacgagtttgtagagtgagcgataaaatgtacaatggcttttcaggcagagacataacctggaggttatagcgaatggcgaactgggcgcagaaattgaaattacatcacctgcaaacgctggttgcgctgggcgaacagggcaacctgacgcacgtcgcccggatgatgaatatctcccagccggcgctatcgaagtggctatctcaactcgaagatgagataggcatcacgctttttgagcgccacagtaaaggactacgcccctcggaaggcggtaaattactgctccagcacgcccagcgcctaattaacgatctggagcgttcacagtatgaaatcgcccgtttcaagcagggcggcctggttggcagcctgaagatcggctgttcgcccgtggcgactgactgcgtatcacaggcgattctgagcctgcttaacgaaatgccgacgctgcatctgaatattgaagagaaggtaatgacgccgctgctgcacgatttgcttgccggtcaggtggatgtggtggtagggcgtgtcggcggccgcgccctgcaactgccgcttaattatcaggtactttataccgagccggtctgctttgtggcgcgtccgcaccatccgctggccgcgcgagcgcagatcgcctggagcgatctggcgcactggcggtggatagtctggccaaccggcacccctattcgcatcagtattgataacgccctcgtcgataatggcgtcatgctcccggaaaacaccattgaatcggcgtcaatgaacgtcagcaccaatttgctgcaaagcagcgatatgatctctattctttctttacggctggcgcaacgctatgccagccaggggcaactggcgattttaaacttgccaaaaattgagcaaaaaggcagcgtagggatgttctggcgtaagaatgagacgccgtctttggccctgagtcgctttttgtattttttagcccaggtttagcgccgccgaccaggggcattgcccgatgttcctgctgtctatacccactatgctaagaattcatgatgtgatcggtagcacgttttaacgtttaattgtatgatgaatccatctcatcaagggctttaaacatgagtaagtcactgaatattatctggcaatatatacgcgcttttgtattgatttatgcctgtttgtacgcaggcatttttcttgcatcactgcttcctatcactattcccggcagcattatcgggatgttaattctgtttgtattgctggcgctgcaaattctgccggcaaagtgggttaaccccggctgttatgtgctgattcgttatatggcgttgctgtttgtgccaattggcgttggggtcatgcaatattttgacttactgcgcgcgcaattcggcccggtggtggtctcttgcgctatcagtacgctggtcgtttttgtggtcgtaagctggagttcacatctgatacacggtgagcgtaaagtggttgggcagaagggaacgaaaaaatgatgacatatatctggtggtcgttaccgctgacgctggcggtatttttcgccgcccgccgactggcggcgcattttaaaatgccgttgctgaatccgctgctggtggcaatggtagtcattattccttttctgttgctgaccggtattccctacgagcactacttcaaaggcagcgaagtacttaacgatctgctgcaaccggcggtagtggcactggcctatcccctttatgaacaattgcaccagattcgcgcgcgttggaaatccattattagcatctgttttgtcggcagtctggtagcgatgattaccgggacatccgttgccttgctgatgggcgcaacgcctgaaatcgcggcatcggtactgcctaaatccgtgactacgcctatcgcgatggcggtgggcggcagcatcggcggcatccccgcgatcagcgcggtatgcgtaatttttgtcggtattctgggcgcggtgtttggccacacgctgttaaacgcgatgcacatccgtactaaggccgcacgcgggctggcaatggggaccgcctcacatgcgctcggtactgcgcgctgtgccgagctggattaccaggaaggcgcgtttagctccctggcgctggtgatctgcggcattattacctcgctggtagcgccctttttgtttccgctcattctggcggtaatgcgctaacgacgggacaaaagaccgggttaaaatttgcgatacgtcgcgcatttttcattgaagtttcacaagttgcataagcaatgagatttagatcacatattaagacatagcaggcccgtaaactacggttccattacattgttatgaggcaacgccatgcatccacgttttcaaactgcttttgcccagcttgcggataatttgcaatcagcgctggcccctatcctggcggaccaccattttcccgccatgctgaccgcagagcaggtctcgacgcttaaaaatacggcgggactggacgaagacgcgctggctttcgcactgttacctctggcggcggcctgcgcccgtaccgatttgtcccattttaacgtcggcgcgattgcgcgcggcgttagcggcaactggtatttcggcgcgaatatggagttcctgggcgccaccatgcaacaaactgtgcatgctgaacaaagcgcgattagccacgcctggctacgcggcgaaaaagggctcgccgccgtcaccgttaactacacgccttgcggccactgtcgccagtttatgaacgagctgaacagcggtctggatctgcgcattcatctgccgggccgcgcgccgcatacgttacgcgattatctgcctgacgctttcgggccaaaagatctggagatcaaaacgctgctgatggacgagcaggatcatggctttacgttaacgggcgatacgctaacgcaagcggcgattacggcagccaataagagccatatgccttatagccactcaccgagcggcgtggcgctggaatgtaaagatggccgtattttcaccggcagctatgcggaaaacgccgcctttaaccctacgcttcccccgctgcaaggcgcgctaaacctgctgagtctcaatggctatgactatgcggatattcagcgcgcgattctggcggaaaaaggcgatgcagcattaattcaatgggatgccaccgccgcaacgctgaaagcgttaggttgccataatattgaccgcgtgcttctcggctaagcaaatgtgccggatagcgacgcactggcgtcttatccggcctgactctcctcttccgcgacccgatacaagggaaatcatgctgaaaatctccgcaatcagacggcggtttcttgcgctacgtcttcgggtacagtagcctgatcgtactttcatcctggtatcgagtttcctgcatgttaaagcgcgtgttttacagcctgttggtcctggtaggcttgctgctgttgacggtgcttggcctcgatcggtggatgagctggaaaacagcgccctatatctatgacgagctacaggatctcccctaccgccaggttggcgtcgtgttagggacagccaaatactatcgcaagggtgtcattaatcagtactatcgttatcgtatccagggcgcgttaaacgcttacaatagcggtaaagtcaattacctgctgctcagcggcgacaatgccctgcaaagctataacgaaccgatgaccatgcgcaaagaccttatcgcggcgggcgtcgatcctgcggacattgtgcttgattacgctggcttccgtacgcttgactccattgtgcgtacccgcaaagtgtttgataccaacgactttattatcatcactcagcgcttccactgcgaacgcgccttgtttattgcgttgcatatgggcattcaggcgcagtgttacgcggtaccttcacccaaaaatatgctgacagtgcgcctgcgcgaatttggcgcccgctttagtgcgctggcggatctctatatttttaaacgcgaaccgcgttttttaggcccgctggtacctattcccacgcagcatcaggtgccgaatgacgcccaggggtatccggccgttacgccggaacaattgcttgaactggaaaagaaaaaagggaaatgatcatggatgtacagacgatatttgtcatattagcctttctgctactcccgcttttttgcttccgtgaggcctggaaaggctggcgaaccggcgcggtagataaagttgtcaaaaatgcgcgaaaaccggtttatgtctatcgccatgccgatcccgtacaatattggtcttatctttttctttataccggttgcggttttttatttactggaatgattatttatcttcttttttatcgttaatctatttattatccctttaaaattgagaatagttattattatgatataaggaacaaatgctgttttgcattctggtttcatttttttgtgaattctttcacagaatacccttctttcaatgcttaggctggcggtagattttagatcattaaaacgcgttatttgcgtttcgccttaatttattcaagcattaaggaagattatatgccgcaacaaaattatctggatgaactcacgcctggttttacgccattactggcaataaaagaggcttcacgttgtttattatgtcacgatgcgccctgtagtcaggcttgcccggcgcaaaccgatccggggaaatttattcgttctatttactttcgcaattttaaaggcgcagcggaaactatccgggaaaataatgcgcttggcgccgtctgcgccagagtctgtccgacggaaaaattatgccagcgcggatgtacacgttccgggatagataaacctattgatattgcacgcctgcaacgttttattaccgattttgaacagcagactgccatgcagatttatcagcccgggagtaaaacacgcgggaaagtcgcgattattggcgcgggtccggcaggtttgcaggcaagcgtgacgctcacgcatttaggctatgacgtcaccatttacgaaaaacagccgcagcccggcggatggctgcgtcacggcatcccggcatttcgtctgccgcaaagcgtactcgatcaggaaattgcccgcattgtagaaatgggcgtcaatattaaatgtaattgtgaggtgggcgggtcgctatcgcttgcgcaactcaaagccgaatatcgcgccgtgctgatgaccgtcgggatgtcctgtggctctggtttaccgttatttgagcaagccagtcacgtagagattgccgttgattttttacagcgcgcccgtcaggccgacggcgatattagcgttccgcgtagcgcattaattattggcggcggcgacgtagcgatggatgtcgccagtacgttaaaaattctcggctgcccttccgtcacctgcgtggcgcgggaagaattagccgaattccccgccagcgaaaaagaatttaccagcacgcaggcattaggcgtatcgattattgatggctttacgcctgtcgccgtcagcggaaataaagtgaccttccaccatgtacgccactcaggagaactgacgctggaagcggaaaatattattttggccgtggggcagcacgcgcgactggatacctttgcggagataaaagcgcagcataatattatcgacacgcataattatcaaaccgacgacccggcgatctttgccgctggcgatattgttaaaggtgataagaccgtcgtttatgcggtaaaaaccggaaaagaagccgctcaggctattcatcattatttagaggaggcctgctcatgttaacaaaagatttgtctgttaccttttgcggcgttaagtttcccaatccgttttgtctttcttcttctccggtaggcaattgttatgagatgtgcgccaaagcctatgataccggctggggcgggatcgtttttaaaaccattggtttttttattgccaacgaagtctctccacgttttgatcacctgacgaaagaagataccggttttattggcttcaaaaacatggagcaaattgctgagcatccgctggaagagaatctggccgccattcgacggctaaaacaggattatccggataaggtgctgattgcttccatcatgggagaaaatgaacagcagtggcaggaactggcgcgtctggttgaagaagccggcgcggatatgattgagtgtaacttctcttgcccgcagatgacctcgcacgccatgggaagcgatgtagggcaaagcccggaactggttgaaaaatactgccgcgccgtaaaacgcggttcatctttgccaatgctggcgaaaatgacgccgaatattggcgatatgtgcgaagtcgcgctggccgccaaacgcggcggagccgacggtatcgccaccatcaacaccgtgaaatccattactaacatcgacctgaaccgcaaaatcgggatgccggtggttaacggtaaatccagtatctccggttattcaggaaaagcggtgaaacccattgcgctgcgttttatccagcagttgcgaatgcaccctgaactgcgcgatttcccgattagcggtatcggcggcattgaaacctgggaagacgctgccgaatttctgctgctgggcgcggcgaccctacaggtgacgacaggcattatgcaatacggttatcgcattgtagaagatatggcgagcggcctcagccactatctggccgatcagggatttgcctcattacaggagatgatcgggctggcgaatggcaatattatcccggcggaagacctggatcgcagctatatcgtctatccgcggattaatcaggagaaatgcgtcggctgcggacgttgctatatctcctgctatgacggcggtcatcaggcgatggagtgggatgaacacagccgcacgccgcattgcaatacggaaaaatgcgtcggttgtctgctgtgcggtcatgtctgcccggtcgcctgtattgatttaggcgaggtcaaatttaaaaaaggcgaaaaagagcacgcgttaacactgtagctctcggtatgaagcccggcgcgcagtttcgctgcgccgggttatctgataagcaaggcaataggtctggataactacttcttacgcgcgtatttcagcgagtccagcgccacggcgaaaatgataatgccgcctttgataatgtactgccagtacgggtttaccccgatataggtcaggccgtagttgatgacggtaaagataatgacgccggtcaccacgccgaagaccgtacccactccgccgctaaacgatacgcccccgaccacgcacgcggcaatcgcatccagttcatacataaagccgaggttgttggtggcagaaccaatacgccctgcttccagtaagccgccgaaggcataaaacacgccggagagcgcataaatcatcagcaggttcagcgccacgtttacgccagaaactttcgccgcttccgggttgccgccaatagcaaaaatgtttttaccaaaacgggtcttattccacagcacccagacaaacgctaccgcaatcagagcgtaaaaggtgatgtatgagagccggaaactgcccatcgccacaaagccctgtgcaaaggtggaaaagccgctgtcaaagccggaaatgggcgaagcgccgacaaagtcatagtaaagggagttgatcccataaacgataatcatcgtgccaagcgtggtaataaacggcgtcacgttcaggtaagcaatgatgatgccgttcaccaagccaatcaccgcgccaatcgcgcagacaatcaggatgaccagcgcaatcggcatggtcgccatttccggaaacactttattggcgttttccattgattgcagtaatgttgccgccacgaccgccgccagccctacctgacgccccgccgacagatctgtcccctgggtgacgatgagtcccgccacgcccagcgcgataataatacgtaccgaagattgcgtcagaatattacttaaattcagcaaacttaaaaaagtcgggtcctggaaaataataatcgccagcaacactaaaagaacgacgtaaattccgccctctttcagccaggtcaaaaagcttttcttgtttaacgcactcataaggagcccctgatcttaaaggtgcaaagaagcaagacgcaaaatttcgttttgcgttgttgttttagtatcgacaatgccggaaacgagaccgttactcatcaccaggatacgatcggtaatccctaacagctccggcatttcagaagagataatgatgatccccttgccttttttcgccagttccgcaataagctgataaatttcaaattttgcgccgacatcaatgccgcgggtcggttcgtccagcattaatatttccggctgcgttaatagccagcgaccaatgatcaccttttgctgattgccgccggaaagcgaaccaatttgcgtgcgatgccccggcgtttttacccgcatggaatcaatgacccattgggtgtcgcttttcatccgggaattatccagtaaccccactttatttttataattacggatattcgaaattaatgagttaaatccgatatccagataggcgtaaattccggtggaacgacgctcttccgtcaccagcgcaaaaccgtggttaatcgcttcgttcgcagtgtgattattaattttcttgccatgtaaagtgattgtcccggacgacttctcacgaatgccaaacagcgtttcgacgatatcggtacgctttgccccaaccagaccggcaatgcccagaatttcgcccttgtgcaaatcaaaggagacatcgcgaatggaaggctgacgcagcgaggtcaggtgacggacctccagaatcacgtcgcccggcttattttctttatccgggaaacgctggttcagggaacgcccgaccatcatcgcaatgatcttatccatatccagcccttccagcggctgggtggcaatccactgaccgtcgcgcaaaatagtaatttcatcgcacaattgaaaaatttcttccattttatgcgagatataaacaataccgcagccgcgttctttcagcttgcgaataatcgtgaacagatgattaacctctttctcagttaacgatgaggtcggttcatccataataacgatcttagcgttataggaaaacgccttcgcaatttcgatcatctgcatttgcgaaacggataacgttcctacgcgcgcgcgtgggtcaatatcgatatccagttcatcaaatatcgctttggtatcctggtacattttatcctggtcgacaaacatacctttggtgggataacgtcccagccacatgttatccatgaccgaacgttgtaataccaggtttaactcctggtgtaccatcgaaatcccattctccagcgcttctttcgccgaatggaagtccacttcttttccctgaaatacaatgctgccggaatctttttggtaaataccgaaaagacattttaataatgttgatttgcctgcgccgttttcgcccattaatgcatgaatagagtgcggacgaacgtttaagttgacattatcaagcgctttcacgccgggaaatgatttgttaatgccacgcatttccaacaaatattcacccgacggcggagaaatcgtgctgcccataatgataccctgtcggcctttttaattatgactatccgcgccggatggcaaaagaaatacgttatccggtctgcggcgcgtcacccttccacggtttcagggcgcaacaaaattgcgcccacagacggaaaagttatttttgggtaaattcgctcagattgtctttgtccacgccgacataaggcacgcgcacgattttattctcaatcttccagctggtgccgtcagccgcgcccttgccttcggcgaggtttttcgccagatcgaatgtcgctttcgcctgattgttggcgtcattcagtaccgtaccggccatcgcgcccgatttcaccagcgccagggcttccggtaacgcatcgacgccaaagaccggaatcgacgatttattatgcgctttcagcgcctctaccgcgcccatcgccatcgcatcgttattcgcgataaccacttcaatcttgttagcgttcgggccagacagccaggcatccatcttatcttttgcctgcgcggtatcccacatagcggtgtctaacgccagttgctcggtctgaatacctttatcatttaactctttcaccacatacgtcgtacgggcttcagcatccgggtgccccggctcgcctttcagcagaacatactgaattttaccgtctttattcagatcccaaccctgattcgcctgccagtgtttggcaatcaagtcgccctgaatcacaccggattctttagagtcagtcccgacataatacgccttgtcatagctgtccagcgctttgcgggaaggctctttgttaaagaacaccaccggcacattttgcccgcgcgctttctcaatcaccgtaccggcggctgccgggtcgaccaggttaatcgccagagctttaacccctttcgccaataaaacgtcaatttgatcattctgtttggactgatcgttttgcgagtcattcatcagtagctgaacatccggcgcggatttgccatctttttcaatagccttacgcaccacggacataaagttatcgtcatatttataaatcgtcacgccaatacgagtatcagccgcgtgcgcgtgcgcgccgaataacagacttgccatcacggcagaaagggtcagtaccttcttattcatggtagctccggttttattatgtagggtatagcgtaaaaaaatgcccggctgttcagcacgttaacgcgtgttactgaacgccgaagcgtatttagagcctatcccaccaggcgttattggcgcagccagtttggacacggacagcgcgcaaaaaccggagcgtacacgtagtacgtgaggtttgactcgctacgctcgcccttcgggccgccgctagcggcgttcaaaacgctaacgcgttttggcgagcactgcccaggtccaaaatggcaagtaaaatagccctaatgggataagctcttattcaactctttatttttgtccggtagtcgcgggatattgtgataacggtttttataagcgaaataccccagcaaaactgacaactaactgttacacgttagttacagtgcgacaaacgttgtcatcatagctatcacaatgttaataaactgtgaatttactcacagattgaaaacggttacatgcggtgcgtaatcagttagtgatcagtaccgcattctgtcgccatgccaccgaatggcgccgtaccagggtcggcataaagcagtgcgtcgccgtgatatccagcgtgcctgcggccccctgtaacgccagctcggtcgcgattttcgccatagaagcaataggatagcgcacggtagtcaactgaggatcggtataacgagcaatagggatatcatcgaaaccgatgacagacagatgcaagggaatggcgatgccgttatcttttaacgccgtcagcgcgcccgccgccatgttatcgttataggcaaataccgccgtcagttgcagattgcgtcccagcaactcaaccattgccgactcgccgccctgcatgtccggcgtgccggtgcctatccagctctccgacgcagcaatcccctgctcttgcagcgcgtgtaaccacccttctctgcgcatcgcgtcatcttcaatacggtggctggaggccaggtagccgatgcgttgatgtccattattcagcaacattcgggtcgccattctggcgccgctcacattgtcgagacaaacacaacgatgcgcataacccggcacgatacggttaatcagcaccataccggggatctgatccataaagtcgctcagctcgcgatcggttaaggcttttgagtgaacaatcaatgcgttacaacgctgacggatcaagacttcaatcgcatggcgctctttttccgcctcatgataactgttgccaatgagaacatatttctggtgctgctgcgcgaccagatctacggctttcaccagagcgccgaaaaaggcatcggaaacatccataaccacgacgccgatggtgtcgctcacctgagtggccagcgcttgcgcattcgcatttggccgatatcccagcagggtgacggcctgcataacggcgtcacgggtgtcgggactgaccaacgcgctgttattcagtacgcgggaaacggtcgctacagacacgccagcctggcgcgctacatcacgaatggtgatcatattcactgccctgtttgagttcaaaaatgctcacaaatgccccgttagcaggcggctattttgtcagcaccctgcccagggctgcgtgagaaacatcacagggatggaaacggttacagccattttgttaatgaatgtgatccagatcgttatctgagcgatcctgacgcgcgcaacgtgagttgacgccataaccactcgaccggtccctgtcgccagaaacgtagccagatgacggaaaagagaaggtttattgcccataccggaacgacaaagaacaagagttccagtcgattgaatttcataaataagccaaactgataaaacagcgtggtacagatgatcgtctgcagcagataattggtcagcgccattcgccctacgcaggcaatggcaagcgtcagtctgcatcggctaagctgcggccagaagccaaacatcagcgcggcatagcccagcgtttgcaacggcgcgctcagttcgcgcggcgcctgcaataagaaggcgcaccagcggtacgcccagtccagccgccattgtaagatgaccgcaggcaggttgatcattagccctaacgccaccagcagagccccggtacggcgatagtgccgcagactgtactgacctttcagccagccgctacgcattagcgcagcgcccagcagcatcatacccgccagttgccagccatactgcgcgccgagcgccagtaaactattcgacagcatctctgcccggttgctgatagcctccatgccgccattcagcttccagtatttttcatacaatattgccgacgcatccggcgtccaggcgcggctggtttcgctactcgataccacgcccagcagcagtagcacgccaatcccgaccagataaaggagtatgccggtattgaacaggctttttaccgaaggcgcatcgcgtatcagtcgccagcaaattaacccgaccagaccgtaggccagcagaatgtcgccgtcccaaaagaataacgcatggataaaacctaacagtaccaatagcgttaagcgcgactgaatccactgtttaccacgcggaagcagcatttgtagccccgcgccaaacaacaacgcgaacagcgtaagaaacttagcctgcgccacaatatcgagaatcgcccaggaccaggcgtcttcgggaacgatcgcgccgtaccaggcgggattgagataagccgccttcggcaatccaaaggcgctaatgttaagaagcaggataccgaggatagcgacgccacgtacaaaatccagcgtgacattacgctccatcgtctccaccttaatcatggatgatggcgaacggcacgcagaaactcctggcgcgtattctggctggacttaaacaatccgcccagcgacgtcgtcgtcgtggcgctggttgcgtcacgaataccgcgcgctttcacgcagtaatgcaccgcatcaatcgataccgctacattattggtgccgagcaaggtttgcagcgccgtcagaatttgttgggtcaaacgttcctgaacctgcggacgctgggcgaagaattgcacgatgcggttaattttcgacaggccgatcacggaatctttggggatatacgcgacggtcgctttgccatcaatggtcacgaagtgatgttcacaggtgctggtcagcgtgatatcgcggacggtgaccatttcatccaccttcattttattttcaatgagggtaattttcgggaaattggcatagtcgaggccggcgaaaatctcgtcaacgtacatcttagcgatacgatgcggcgtttccatcagactgtcatcgctcaaatcgagattcagcaactgcataatctcagtcatatgccctgcgataaggctttttcgcgtttcattatccagttcatccataggcgggcgcagcggcgtttccagcccccgggcaaccagcgcgtcatgaaccagggccgcttctttactgagtgatggcattaatcgtgttctcctgcaggtgtggcgcctctgccctgcatggggcaaagtttgtcaatattgtgacagtgtgattattgtgcgtgaggtagcgcacataatccagtattcacgcccataattgttgaaattgtcgctgcctttcatgacatctgttccggtgcgaaaatgatggcaggacaaagggcatatttgttaacgcaacgttatttaaatgatgaagcatgtttatgtattacggaagtgaaagttactcacaacgcggtgaataatctgtattatgaagaatctgcataccttatcaggttcactataaaaggagcccccgcatggaaatgctcgaagagcaccgatgttttggcggctggcagcagcgctggcgtcatcatgccgccacgctaaactgcgccatgacattcagcatttttcttccgccgactcaggataatgaaccgcctccggtactgtactggttgtctgggttgacctgcaatgatgagaactttaccaccaaagcaggcgcgcagcgtatcgcagcagaactgggcattgtattggtgatgccggataccagtccacgcggtgaacaggtcgccgacgatagcggatacgatttaggccacggcgccgggttttatctcaatgccacacagccgccctgggccagccattatcgcatgtacgattacctgcgcgatgagcttccggcgcttatccagacacagtttaacgtcagcgaccgttgcgccatcagcgggcactcgatgggcggccacggcgcattaatcatggcgctgaaaaatccgggcaaatacaccagcgtctctgcttttgcgcctatcgtcaaccccagccgcgtgccgtggggaatcaaagcgcttaccgcttatctcggcgaagatgaatcagcctggactgagtgggatagctgcgaattaatgctggccagccagccgcaggacgccattcctgtgctcatcgatcagggcgacagcgatcaattcctcgccgatcagcttcagcccgccgtactggcggaagccgcgcggcaaaccgcctggccgatgacgctaagaatccagcctggctacgatcatagctattattttattgcgtccttcattgaggaccatctgcgctttcatgcccggtatttacgggacgagcgtgagacgtcaccaacataatgaattttccagcgccgcgctgtaattcacctcctccgactgcggcgcggaagatttattatttaaatccgcggcctgctggcgtacctgaaggcggccgctgccctctccgccttcataactttcgtgaaaattacgcagctcggattcaaacagcaccgcatcaagattatgcaacttatccagcgcccgcaggagagaaattaacgtatcaagattgagccctcctcccttctcgatacgcttgatggtggcaatgccaacgtgcgcgcgatcggcaagctgctgctgggtcatcgaaagagacagacgcgtctcctttaagcgggcgcacaacgacaggataatctcgtcgttattcatcgtattgtatttcacgcggttaccctctcttgcgcggctgaattttccccagcgaaccatgatacgtttcacggtatttagcgctcatgtctttaccggtctcgtacatcgcagcaatgatctcatcgagcgaaatacagggttcgcttacgcgactcatcgccatcgtcgccgcgtttatcgctttcacggcagagatagcatttctctctatgcagggaatttgtacctgtccgcccagcggatcgcaggtcaatcccagatgatgttccatggcaatttcagcggcgctcagcgtttgctccacggatgcgcccattagttcagccaggcccgccgccgccattgagcacgccacgccgatttccccctgacagccaacttcagatcccagaatagaggcgttttgtttaaacaacatcgcgatagcggcggcggtcaggaagaaacgggtcagagcaccgggctccagcggcgtgacaaatttatcataccagcaaagcgctgccggaatgatgccgcacgcaccattggttggcgcggtaacaatctgtccgccgctggcattttcttcgcttaccgcaatcgcgaaggcattgacccagttcagcgcggttaaaaaatcgctggcggagcgattagcctgtaacgtcttatgtaacgcgcaggcgcgccgcggtacctgataggggccgggtaataccccctcagtatgcaggccgcgataaaccgcctgctgcatcacgtcccatatttgcgccagataattctgcaacgtctgtggcgagtggcggcacagctcatttttcatcatcagcgccgccacggacaggccgttacgccgacacagcgccagcaactgcgcggcatgactaaattcaaagggcgacactgtacgcaaaggaagcgatggcgtcagcggctcgccatgtttgcgaacctgtccggcgccggtcgaaaaccaggtctcttcatacaccgtgaaataatcatctctggcgcgaaacgtcatggcataaggatggcctggatgcgcctggtgattggcgataatcttgacttttatcgtgattccgcccgcgtcggagagcgggagttcgattttgttttcattttccgcacgcttaatcaccgccatatacgaacggagatcgacattctccggctggcaacccagcagcccaagataaagggcggtatccacattgtggcacttgcggcttaacgataacgcgccatacagctcgatttcaatttcccgaattagcggtaacgtctcttgttctctgagcaatgaaataaagtgacaggcggcgcgcatcggccctacggtacgtgagctggatggacctattactattttgaatatatcaaggcaactctccatcgttatatcaatcctttcagtgtcattcgcgttcagtaataaataacatcctcgcacagttggcatatcaaaagtgataccttttgtgtctgaactttacctggtatcaaaaacaacgcttttttagcccttttctggctgtgatatctgtgatagcacgagattccacgccgcaaaagagccattataatacccgtaaattaagggagttatcatatgagcattatttattttattactacacaggatatcgatacgtttcagaaaaaattacaggaaacgttatttaatgccgtcaccatgccgtttccgctattatttgataaacgttatgccgcgcttatcaataccgcttatttaaagcttacgctgccagcggaatgtctgacgcctgaattttatcgctatttacgcgaactctcattgcaatggcagtttgatttttttattaagccgcagccactgcctgctaacggtattatcgcgtttgatatggactcgacatttattgcggaagaaggcgtggatgaaattgcccgcgagcttggcatgtcgacgcaaatcaccgccattacccaacaggcgatggagggcaagcttgattttaacgccagttttacccgacgtatcggaatgttgaaaggcacaccgaaagcagtgctgaacgccgtatgcgatcgcatgaccctttcgccaggcctgttaactattctgccagtcatcaaggccaaaggatttaaaaccgcgattatctccgggggactggatatattcacccagcgtctaaaagaacggtatcaactggattatgccttttcgaatacggttgaaatacgcgataacgttctgacggataacattaccttgccgattatgaacgccgcaaacaaaaaacagacgctggttgacctggctgcccggttaaatattgccacggagaatattattgcctgcggtgatggcgccaacgatctgccgatgttagaacatgctggcaccggtattgcctggaaagcgaagccggttgtacggaaaaaaatccaccatcagattaattatcacggtttcgaattgcttctttttcttattgaagatgaattataacgcgactcacctcgccggaagggaattttaaaatgagtataaaaacatttattttcagccagcccgataagccgattgtaaaagagaaaaaagagatagaccagacctataaaaaatttcgttttgagattatcgcctcggtctttatctcttatgccgtcttttatcttacccgtaaaaacttctccgccgcgatgccggccatgctgacggaaacgtcgctgaccgcagaagacttcgccattatgtcttctattttttacattctttatggcgcgatgaagtttgtcggcgggatgctggtcgataaaattaacccgaaagccatgaccggcccggtgctgattggcgtggggattgtaaatattctgttcggcttttccgacagcgtggcggcattctacgtgctgtacagtctcaacgcgatattacagggcaccagctttccgccgatggcgaaaattatggcctcgtggttttcgaaaaacgaacggggacgctggtgggctatcgttgaagcggcgcacaatatcggcggcagcctcgcgccgctgctgaccagttttgctatcgcctttagcggtagctggaaaatgggattttatgttcccggcgccatttcgctgctgatggggatagtggcgctatttaccattaaagatcgtcccggtacgttaggtttgcccaacgtggggcagtggcgtaacgacccgacggaactggcccaggtcaaggccagcccggtcaacctgagcttctggcagatttttgtgaaatatatcctgaccaatccactggtatggatcattattatcggtgatatgtcggtttatattgcgcgcactatccttaacgactggccgcagatttactattcgcaggttcacggctggagcctgataaaagcgaactcgattatttcctggtttgaggcgggcggactggcaggtgggttgctggcaggctacttgtctgactttatgttcaaaagtaaccgctggatgaccggattaatcttcgcgttagcgctgtgcatatgcatcgtgctggtgccgctggttcaggatacctcttacaccctcaccgcgattctgttcaccatcatgggcttcgccttatacggaccgcatatgctttttgccgtcggctgtctggatgtgacccataaggatgcggcgggatcgattaccggctttcggggattgttcagctatgtcggcgcggcaatggccggtgtgccggtaattatggtgaaaaatagctgggcgtggtcgggcgtttatatctatgcggtgatcgccattctgctaacgactctgtcgctggcgctgctctccaggctgcatcggttataacattctggcgacagcggcaaaacgcggctgtcgccagtctctgtcagaaacggtaatccaccgccataaagtaacgacgtccgtcttcggtataaccgtagtcgtcgcgtttgagatctttatcgcccacgttcagaacgcccgcacgcagtttaacgtttttcgtcgcctgccatgccgcgccggtatcccagaccacgtacccgcccggcgttttcgctgttgcgctgtcggcccgcttacgcccggtataattccctgatacgtagaatgaccagtcttcgagctgcaccggtttccagtccagcgtaccgttcgcggtgtggaacggcagatcggaaagcggcttgttcccgccattactgacgtcgcgcccgtcgttataggtgtaattcaacgacagtttccacgcctcgttaaacggaactttcaactcggtttccacgccctgaatacgcgctttattcacgttgtaataacggaagaccggaacgcgctgtccccgactgttggtttcgaaaccgacaaagttggaatagccgggcgcggcgttaacgtcaggggtacggctaatgctgatgcgattgtccacatcgttacggaacgtggtaacgctcgcttccacgccctccagtatgccttcttcgccccggtaataaaggccgagctcccagctttcactggtttcaggtttcagatccgggctaccgacaatgcggcatccgccacggcaggagttggtcgcccagtccgggcttaattgcaatagcgacggcgctttaaaggccgtggcccacccacctttcaccgtcagggtatccgttgcgttatagaccagataagcacgcgggctccagtgatcgccataggtttcatggtcatccatacgaataccggtggtcagcgccagcggttcgaagatgcgccactcatcttcaaggaacagagcgtactggctggcggaggttttagtactggaaccgccggtcaggttcaccgcatcgctcagtttatcgtgacgccattcgccgccgaaggtgaggaactggttgacagacgctaacggcagaacgtatttcccgtcaatcgaattgctttctgacgtgatagggctactgttgccggggtttttgttttccactttttcgccgtagaatttgagctcactattgccgagatcccaacgtccgttatggctcaacgcatagttttgccgttccagacggtttttatccagcgagtctgagtcccggtcctggcgatcaaaaccgtagcctgcggtaacgtcatgattttcgtttggtgtccaggcaaactcgacgtttccatcccggctggtaaatccttcaatgcgcggcgtttcacccgtagcggtggtggcggaactctgctgctcgtctttttcgcgtttcgccaggctaccgtaggctttcattcccagcacgccgtcgatcagcggaccgctggtaaagaactgaccgttataagtatcgccacggtcgcgatgttcctgaatagtggagtcaaccgtgacgctgccgtgccatttctgaccaatttttttggtgataatgttgaccacgccgcccagcgcatcggagccatacagcgaggacatggggccacgcaccacttcaatacgttcgatagcgtcaaccggtatccagttcagatcaaaatcattatggcggaagaccgcgttacgggagttaacgcgcttaccgtcgatcaggatcagcgtataactgctgtccagaccacgaatactcacgcctttacggttatccccttcgttagtgagctgtacgcccggcacctctttcaggacatctttcaggttttgcacgggcctgcgctgtaaatcttgctgggtaatgacgctgatacttgctggcgcatctttcagattttgttcgatggcggacgcggtaacgaccatggtttcaccatcatccgttgccgcggcaaccggccaggccaacgtaactgcggacatacaaagccctacccgaacgaaagggttaaacctaaacattccatttctccatgaggtaaatacgacaaaaaaatcggttatcgctcacaacgcattacgtttcgcctgcgataacggttatcacggcgaactctttttatgcaggcgagtcgggctcatgagtgacggtcgcgcccgaatcttcatcctttctgatttcgagcgtaacgataaagcaaacgataataattatcaatttaattgttaataattatgtcatttgaaccaatcatgaagaaaaaacaaaaaaccctctcgaatgagagggttagaagagtcaggttcaggcagtcagtgccggatagcggcataaagcctatccggcctatgacgagaataccgcgttactttttaacgcgttccgggaagtgcatttcgctatagcgcacgaaatgcgtaccttttatcagcttgtagccgaaccagataagcaggaacagcggaataccgatataggtcgccgcgacgccgccccagtcgatggtatctttcaggaacgcttcatagttctgccccaacgtaataatcaggcacagtacaaaggcgaaaatcggccccagcgggaagaacccggaacggtacggcaaatcattcacatcatacccttgtaacacgtaaccgcgacggaagcgataatggctaatggcaatccccagccaggcgatgaagcccgtcataccggaggtgtttaacagccacagatagaccgtctggttgccaaacattgaggtcaaaaagcaaagaccggcaatcacggtggtggcataaagcgcattgcgcggtacgccgccgcgggacaatttcgcaaaaatacgcggggccttaccgtcacaggccagggtgtagagcatacgggtcgaggcatacatcccggagttacccgcagacagtaccgccgtcaggataaccgcattcattatcgccgccgcagacaacaagcccgcatgctggaacactaaggtaaacggactgacgctaatgtctttgacgtcgttacgcagcaggtttggatcggtataaggaatgatcaggctgataatcaaaatcgcgaaaacataaaacagcagaatacgccagaacacctgacgcaccgcgcgtggaatattcttctccgggttttcagattccccggcggcaataccaatcagctcagttccctggaaagagaagcccacgatcatcgcgacgccaatcattgccgcaaaaccgccagcgaaaggcgcatcgcccgtcgtccagttgctccagccgaccggctcgacacctttaaaaatgccgataatcatcgctacgccaacgatgatgaagataataacggtcgcgactttaattaacgagaaccagtactccgcctcgccaaaaccgcgtacagaaatgtagttcagcaagaaaatgacacagaggaatagcgcgctccagatccagcccggcgtgtccgggaaccaccagcccatcaccaattgcgcggcaaccaggtcaacagcgatagtcaccgcccagttgtaccagtagttccagcccagcgcgaaaccaaagccttcttccacatagttctgaccatatgtcgcaaacgagccagatactggcatataggccgccagctcgccaagactggtcatcaggaagtagaccatcaaaccaatcagaatataagaaaacagcgcgccgcctggccccgcctgagaaattgtcgcaccagatgcaacgaaaagacctgtcccgatggagccgccaatggcaatcatcgtcaggtgacgcgcctttaattcgcgacgtagcgcgggcgcttctgtggttttagttttggaacccatgtgaaaatgctatccatccaaaaaatgaggcgcgattgtaacagacgaaatactatccttccgacacaaatgcgcggttataagagaccttcatgaccggccacggattataagtaaagcagagaataacgtatacgtaagcggatactaaaaatggcgatgccgcccgggcagccctcctcttcacctttattcacagtaactcaaaaaacgctgcaacgcgttagaaagatgtttctgccgatgatgaacacgccacaacgtgcgcaccaggcgcggtaacggcaccgcgacttcgcccagggttcccgcctggagttgttcagcaatcacccggcgcgataaacaacttatccccagtccatgacgcaccgcatgtttgatcgcttctgaattccccaactccatcgccatatgaaagcgcggcaaatgcgacaacagcaaataatcgacaatttcccgcgtaccggaaccgcgctcgcgtaaaatccatggggatgccgcaagctgttccagcgtcaccggcccctgcgtcagcggcgaggacggcgcggcaaagaccaccagctcatcttccagccacggctcagagataatctctgtactgtgacatggtccttcaatcaggccgatatcaacccgaaaatccagcaccgcgttaatcacgtcctggctgtttcccacgctgagttccagcggcaaggccggataatgctggcgatagcgggcaatcatagcgggtaaaatgtaattgccgatggtgctactggcataaacccgtatcgcgccgttatcttcacgaaatagctgctcaatttctatcgcttgctccagcaatgccagcgcgcgcgggtataacaagcgcccatgttcgttgaccaccagccgtttccccacccgatcaaacaactgtacgccgagctgaccttccagatcggtgagcgcggcgctaacggcggactgcgataatgacagcatgaccgacgcctgggttgttgaaccgcttttcagtacttcagcaaacacttcaagttgtcgtagcgtaatatgcatagtcgtatcccaccgatagcgtttcacttaccacttataaagattaattataaatatataatcaattttatttttaaaccagatcaccgtaaccttattgtccatatacaggagaaggttatgacagaactcaccttgcagaatcatcgtcgtacaatgtggcattttataccggggctcgctctgagcgccgtcattacaggagtcgccctgtggggcggcgctatccctgccgttgcaggcgcggggttcagcgccctgaccctggctatcctgctgggtatggttatcgggaataccatctatccacaaatatggaaacaatgcgacggcggcgtgctgtttgcaaaacaacatctgctgcgtttagggattatcctttacggcttccgccttaccttttcacaaatcgccgacgtgggcattagcggcattgtgattgacgtattaacgctttccagcacgttcatgctggcctgcttcttaggccaaaaagtctttggtctggacaggcacaccagctggctgattggcgccggtagcagtatctgcggcgcggcggcggtactggcgacagaaccggtggtaaaagcggaagccagtaaggttactgtagccgtcgcgactgtcgttattttcggcaccatcgctattttcctttacccggcaatgtatccgctgctggcgcactggttcagcccggaaacttacggcatctatatcggctcaaccatgcatgaagtcgcgcaagtggtcgcagcgggtcatgccgttagcccggatgcggaaaatgcggcagttatcgctaagatgctgcgtgtcatgatgctggcgccgttcctgatcattctggcggcacgcgttaaacagctttcaccggcgaccggcgcggaaaaaagcaaaattaccattccgtggtttgctattttcttcatcgtagtggcgatcttcaactctttccacctgctgccgaaagccgtggtggatatgctggtgacgctggacacggtgctgctggcgatggcgatggcggcgttgggtctgaccactcacgttagcgcattgaaaaaagcgggggcgaaaccgctgctgatggcgctggcattattcgcctggctgattattggcggtggcgccattaacgtcctaatccatagccttatcgcataaattattacgtttcacgcctgttaacccgttatcatagcgttcgtaatgaaccgttagcgggtttaacaggagtcttttatgaaatacatcggagcgcacgtcagcgctgctggcggtctggctaacgcccctgcccgcgcggctgaaattggcgcaacggcctttgcgcttttcacaaaaaaccagcgtcagtggcgtgccgccccccttactccccaggtcattgatgactttaaaatcgcctgtgaaaagtatcatttctcggcggcgcaaatccttccccacgatagttacctgattaatctgggccatccggtcagtgaagcgctggaaaaatcacgcgatgcctttctcgatgaaatgcagcgctgtgaacaactcggcttaaccttgcttaattttcatcccggtagccatctgatgcagattgcacaggaggattgcctggcgcggatcgcggaatccatcaatattgccctcgcgcagaccgagggcgttacggcggttatcgaaaatacagccggtcagggcagtaatctggggtttgagtttgaacagttagccgccatcatcgacggcgtggaagataagtcgcgcgttggcgtctgtatcgatacctgccatgcctttgccgccggatacgatctgcgtacgccagaggcgtgcgaaaaaacattcgccgaattcgggaaaattgtcggatttcagtatttgcgcggaatgcacctgaacgacgccaaaagcgccttcggtagccgcgttgaccgccatcacagtctgggtgaaggcaatatcggccacgatgcgtttcgttggattatgcaggatgggcgttttgacggtattccgctgatactggagaccatcaatcctgatatctgggcggaagagattgcgtggttaaaagcccagcaaattgccgaagcgatggcctgacgctcaatgttcttcaggcaataaaaaaggcagagcgcgctctgccttttttagcgtgtttctcttatgccgcttttgccgtgacttccgtctccggacgtttcaggacggcataagccagccctgccaccagcgtaccggccacaattgccagcaggtatcccaataccggcgtaattgcgcctgggataagcagaacaaacagaccgccatgcggcgccatcaattttgcgcctaccgccatagaaatggccccggtcaacgcgccgccaacgatacagcacggcagtacacgcatcgggtcgcgtgccgcaaacggaatagcgccttcagtgataaagcacagccccagcaccaacgccgctttaccgccttcctgctgcgctttgtcgaacttacggcgcgccaccatcgtcgccagacccagcgctaacggcggtaccatacctgcggccatgatcgccgccatcggcgcgtaagtttgcgtactcagcagaccaacaccaaacgcatacgccgctttgttcaccgggccacccatgtcggtacacatcatcccgccgagaatcgcgcccagcagcaccgcgtttaccgtccccatggtttgcagccagtgggtgagcccttccagaatcccggcaaccggtttaccgatcaggtaaatcatcgccagccccaccaccagactggaaattaacgggatgatcaggattggcttcagcgcttccatactttgcggaagtttcagtttggtactgataagcttcgccatatacccggcaaggaagccggcaatgatcccgccgataaaaccggaaccggtgctaaccgccagcataccgccaatcagacctggcgtaaggcctgggcgatccgcgatggagaaagcgatatagcccgccagtaccggcaccatcagcgcaaacgccgaaccgccgccaatctgcatcagcgccgccgccagcgtgtccggcaccttaaaggcttcaataccaaaggcgaaggaaagcgcaatacacagtcccccggcaaccaccataggcagcatgtaagaaacgcccgtcaacagatgccggtatgcgccagcgctctctttcttcccttcggtcgccgcttgcgatgccttacccgccggttgatacggcgtcgcttccgctacggctttatccagctcctgcgccgtctttttcagcgccaggccggtcgacgtgcggtacatcgggagaccggcaaacttcgccagatccacttcgatatccgccgccacaatcactaaatccgcttccgccacctcttccggggtgatggcattgccggcccccacggagccgcgcgtttcgacttttacccaccagccgcgttttttcgcttccgtttcaatggcttcagccgccataaaagtatgggcgacgccggtcgggcaggccgttaccgcgaccacgcgtttcggaccgccgctcgccgcaggaacagccgcagcaggggcgctgtaaggggtcgcatggcttttggcttcactcagaaacagttccggatgcgcgacggcgcgaccaatatcccccagccaaacctttttgccgttcagagcattgtcgttcggcagagattcgcccagcacgatcgccagctcagcatcattcggattgtcgataatttccagatttgctttatgcgccgccgctccaagcagggttttcgccatgtaagcgcgagcctggccgagattagcgtcaattatcagcagcgttttcattatgcctctcctgctgtcagttaaacggttgtaagtcgacacgcgccatcattgcggccaactgaggacgatcggtaatacccacattgctctggctgaccgccagcgcggcaaccgccgtcgccagacgcagcgtatgttcgctggactcgcgcatcagcaggccgtaaatcaatccgccaaccatggaatcgcctgcgccgacggtacttaccacgtcaaccgccggtggtttagcgatccattctcctgaggcgttaacccacagcgcgccttccgcccccagcgaaatcaccacatgggcgataccctgttcgcgtaacgcgtgcgccgcatcaatcacatctttcatttccgggagcttacgacccgcccaaatttccagttcgcggcgattcggtttcaccagccacggcgcagctttaagaccggcgactaacgcttcacggctactatcaaagataatgcatggacactggctgcgcagacgcgtcatccagtcggtgaacgcttccggactcacgccagccggtaagctaccgctgacgcagaccatatcgaactgacccagccagctcagggagtcgttaacaaagcgttcccagtctgcgggagtcacgtcaaagccggaaaagttgaagtcggtcacttcgccatctttttccgtcagcttcacgttgatgcgggtccggccctgaaccacctgaaagcggttagcgatacccagttcgctgaacaattgctgaaaaccgtcctggttatctttaccgagaaaaccgccgacggtgacgtcgatgcctaagtctttcagcactttggcaacgttaatgcctttgcccgccgcgtgcagacccgtggttttcaccaggttcacttcgccgcgttcgatttcagggcaaaacccaaccagatcgtaagccggattaagggtaatggtggcaacacgcctgctcattatgcgccctccccgagaccggcggcgatcgcatcgccaatcgctttcagcgcctgttcagcatcttcaccctgcgcggtaaagcgcagacgatggcctttcttcacgcctaacgccaccactttcatcagactacgtccgtttgccggtttgccggttccatcaaggtttgtcacggtaatttcactgttaaattgtttaatcgtattcaccagcatggtgcccggacgggcatggagaccatgctcattacgcactacaaattccgcgctcagtacgtcatccgtcagcgcatcatcactggtcagcaacgccagcagcgtcgcggcgtcagcgctcagcagacgatcggctttattgttcagcaacaggtcgccgaggcgttttagcacggcaatcggctgctcatcgttcatcgcgacagtgactaataaggctgctttttcaccctctacgtcaaacgcctgggtcgcacggcttaccgcaacagcgctgcgcaaattgccttccgcgctgtcgttcagccagatgccttgtcccagattcatcggactatcgttaatcgtttttgcgacgaacgccgcatcaaccgctcccgcctctttcagacgcgccgcatttagcgcctgcaatgtgaccagcgagctggcgatgacatccagcgtcatcgtctcgttatcaagttttaattgttcactttgcttctcgcccatcagcaatgcgcgcagctcttccgccgttgtcgcggatttcagctgttcagccacggagtcatcgcttagcacatgcgtcagctgacgcagcaggccgaggtgttcgtccgaactggcggcaataccaatcgccacgtaggcgacctggccttctccccaggtaacgccctgcgggaattgaaagacctggacgccggttttcagcacctgatcgcgcgtgtctgttgtgccatggggaatcgcaataccattgccaagaaaggtcgaggtttgctgttcgcgcgccagcataccgtcaacatagccgcccgccacattccccgcctgcgctaacgcggcggcgatttgccgaatggcctcttctttatttccggcctgctcgcccggatgaatgtcctgaaccgataactggaacatgtgtctcctctcctgctgaattgaaacgattcagccgctatgagaaaaaaagcgccaatctgagttatcaaaaaaaccagatcgcgctgaaacgtttcaagaagtctggatctttctgcttcagcacgcaagaaaagttaccggttttgtagcaattttttgaggtgaagcacattttttctccaacagaccctcaatagctgacgcataaaaggcttcagcttttttctttcagcttgcgtcagcacgccctggtaacaaactggaatgctattttgatttttcgtgtcgattttgattcagacgcctgtttattttctgacgggcagcgtaaactccgcctctcttcacaccactgatatagaaacatgcacaacagtcccgccgccgctgcgcctaaatcgtttgacctgacgtctaccgcctttttgatcgtcgcttttctcaccggtattgccggtgcgttacagacgccgacgctcagtatttttctgacggatgaggttcacgcccgtcccggcatggtgggtttcttttttaccggcagcgcggttatcggcattatcgtgagccagtttctggcgggtcgctcagataaaaaaggcgatcgcaaaaaactgatcgttttctgttgcgtgctgggcatgttggcctgcgtgttgtttgcctggaaccgcaactactttattttgctgttcatcggcgtctttctcagtagcttcggctctaccgccaacccgcagatgtttgcgctcgcccgtgaacatgccgatcgtacaggtcgtgaagcggtgatgttcagctcaatcctccgcgcccaggtctcattggcctgggtcattgggccgccgctggcctatgcgctggcgatgggttttagctttacggtgatgtatttgagcgcggcggtagcttttatcgtctgcggcgtcatggtgtggttctttttaccgtcaatgcgcaaagatgcgccgctggcaaccggcacgctggaagcaccgcgtcgtaatcgccgcgatacgctgttgctgtttgtcatctgtacgttaatgtggggaactaacagcctgtatatcattaatatgccgctgtttatcatcaatgagctgcatcttccggaaaaacttgcaggcgtgatgatgggcaccgccgccgggctggagattcccacaatgctgattgcaggttacttcgccaaacggttgggaaaacgcctgttaatgtgcatcgccgttgtcgccggactgtgcttttatgtgggtatgttgctggcgcacgcaccggcgacgttgctcggcttgcagttgctgaacgcgatttacatcggcattcttggcgggattggcatgctctattttcaggatctcatgccaggccaggcgggttcagccaccacgctgtataccaataccattcgcgtcggctggatcattgccggttcgctggcgggaatcgccgcagaaatctggaattaccatgcggtcttctggtttgcgttagtcatgattgtcgccaccatgttctgcctggcgcgtattaaagatgtttaacttgcaagcctgatacttttactcttcgacacatttcagcgcagagtttatctctgcgcaatgttcatgcgcggtcattcattgtctttttctcaatacgatattctgttagcgccctcttacataagagaccggttattgagaaaattacgcccatcagtccgcaaagaaccaacaccagccgcatcttatattttggtgtgacagcaacatctatcacttcaatgttagcattatttttaaccgcctccgacaacaaggatagctttgcatatgtttccgtttgtaacatatttttatgcacgctataacgtttaatgtcaccatcatcgatataccatgccgccattttatcgacactatttttcagggtggaaataatattattgacgctttcttccctcccctgcgccttaaaaagaacaagctgatttttcgcgtcaaaacttattttatttttatattccgcaggcaagaaacggctaaactggttaaggataaccgttgttttacattgaatatcattagtatagccacataacgcataggtagcaggcgtatccagattaggtttgattgtcatactcacaacctttgtatcatgctgcacgctcacaaaaacatagccaatggcaacaaaaataaaggtagcgatcatgatacttagccattttcttataaggaataaggaaacgtcgactaaatcaatttcactattttctccccgcatttcacatcccttttaaaacgctaatagtcaacccgaatactgaaataacaaaaagcaacaccagcgtaaaaataaacgccctggctgcgaacgtatatttcttcataagataaaacccacacataagaattcgagtattttaaaggaaaataacaatacattcacactggttatatcgatcggtaaatacatcaatgatagatataaactatcaaattcatgatatcgatcgttataaataattaaaatcgatcaaaattcctctttttaatagataaaaactatcatataaataaaattgatcgtttttgttttatgtgacggttcattcggtacacgttcaggcaccaacggggttgagcggcgacatctaccgcttcagaagccacgaaataagggaatcatgtattacgctatttaatggtaaaaggaggtaatttgaggcgcagcttttgcagactatttcgggatataacgtaagcccctgcacgtttatcaaaaacggcatagctcatggtaaggttttctgttcgagttccagcaaataaataatggcctcttcccgggtcgttaaacacatgtcccctgtcggttgcaaaccagagcacacttttgggcgtaaaggcgagccaaagataaggcacaagttatcttccgaaagctgcacgcatctggtattcatcggcttgccatacggcattccgggtatcggcgacgaaattgaaggcgcaatacagcaagcgccacaaccgctacgacagtccatgctcagccctctatttataaccaaatgaaagataacagaatttgtccaaagaaaaatccagatttaaaatgtggacgtcatcatgatcagacctgccctcagacattccgaagacaaggctggaaacagaagggacaacacagcacacttcccccctccgggcgacatgccatcgcgtattctcgttgaacgcggggcggaaagcgggcgaacagtatcaccttttttgcaccagcaaaagtgacaattccacttgcctggatggcccggcgcgagtagttttacgcgatattttagataatctctacaacaggatctcctcgatgccaagagcgaacgaaatcaaaaaaggtatggtactgaactacaacggcaaattgctgattgtgaaagatatcgacattcagtcgcctaccgcccgtggcgccgccacactgtataaaatgcgtttttccgatgtccgcacaggtctgaaagtggaagaacgtttcaaaggcgacgatatcgttgataccgtcaccctgagccgtcgcggcgttgacttttcttatgtcgatggcaacgaatatgtgttcatggataaagaagactatacgccgtataccttcaccaaagatcagattgaagaagagttgctgtttatgcctgaaggcggaatgccggatatgcaggttctgacctgggacggccaactgctggcgctagagcttccgcagaccgtggatctggaaatcgtcgaaaccgcgccgggtattaaaggagcgtccgccagcgcacgtaacaaacccgcgacattaagcaccggtctggtgattcaggttcccgaatacctgagcgcaggtgagaaaatccgcattcatatcgaagagcgccgttatatggggcgcgcggattaagtttcacatttttcggctgcgccccagggcgcagtctgccccttttatttattgactgttctgcaccaggcaagagaaacgttaaaaatttaacattttctgctcttaagatggcagcagcacgacttcgtcaactcagcacttctctttttcacgtttattcgccaggattattaaaagttgttatgttgtatcaatatcctggagctgacgtgaccaaaaccaatcttattactggatttctcggtagcggaaaaaccacctctatccttcatttattagctcataaagatccggctgaaaagtgggccgtcctggttaatgaatttggtgaagtgggtattgacggcgcgctgcttgccgacagcggcgcactgctaaaagagatccccggcggctgcatgtgctgcgtcaatggattgcctatgcaggtggggctcaacacgctgctgcgccagggcaaacctgaccggttgctgattgaaccaaccggactggggcacccaaaacagattctggatttattaactgcgccggtttatgagccgtggattgatttacgcgccacgctctgcatccttgaccctcgtctgctactggaccaacagagtgtcgccaatgaaaatttccgcgatcagctcgcctcagccgatattatcatcgccaataagaccgatcgcgccacggcgcagagcgatgccgccctgcaacagtggtggcgacagtacggcggcgatcgtcaactgattcatgccgaacatggacagatagacggtaagcttctggatttaccgcgacaaaatctggcggaactgccggccagcgccgcgcattctcacactcatgccagtaaaaaaggactcgccgcgctaaatctgcccgcccagcagcgctggcgacgcagcctcaatagcggacaaggtcatcaggcctgcggctggattttcgatgccgataccgtgtttgacaccattggcctcctcgaatgggcgcgtctggcgccggtgggccgggtgaaaggcgttatgcgcatacaagaggggctggtacgcatcaatcgccagggcgatgacctgcacatcgaaacacagagtgtcgcgccgccggacagccgggttgaacttatctcaaacacagaaaccgactggaatacgttacagacggccttgttgaagcttcgtttagcgacgcacgcgtaaggttgccaccgtttaaaaactatggcgaaatgacgatgaaaacccgctattccttgataattctgcttaatgccgccggtctggcgctgtttttgtcatggtatcttcccgtcaatcacggcttctggttcaccattgattccggcatattccacttctttaaccagaaactggtggaaagccacgcgttcctctggtgggtcgctattaccaataatcgggcgtttgacggctgttcgctgctggcgatgggcggactgatgctcagtttctggctaaaagaaaacgcatcgggccggcggcgcattgtgataatcggattggtcatgctactaacagcggtggtgcttaaccaactcggtcaggcgctgatccccgtcaagcgcgccagcccaacgctctcttttgagcatatttatcgcgtcagcgagttgctgcacatcccgacaaaagacgcgtcaaaagacagtttcccaggcgatcacggtatgatgctgctgatattttccgcctttatgctgcgttatttcggcaaaactgcggggattatcgcccttattatatttgtggttttcgcgtttccgcgcgttatgattggcgctcactggttcaccgatattgtggtcgggtcgctcacggttattttgattggcctcccctggtggctgatgaccccgctcagcgaccgggcgatagcgctttttgagaattatctcccgggcggaaataaacaaattttaaacaaataacctatgtaattaacattaccttcagcgatagttttacatcgttgaaggtaatttatgatgatattcccccagcccatcatttttcggtcatattattcctctgcaaaatgaacagtttgcccgatttttaaacgatttgcgcttaatttgacccgtgctgatagttcactttttgtatcataaattcttataaaaaatcacgcgaaatcgctcgcaatgacagcaacaatcgggtaatctcaaactcgttttgcctcgccagataattattctcattgcgaataaatttgtgcgttccgccacagatttgtgcacaaagaattgtctcaagctgtgcaggtaattagtctcatcacgtttggcatttttataacgatatttatcgttaaggacttcaagggaaaacaaacaacatggtcaaatctcaaccgattttgagatatattttgcgcgggattcctgcgattgcagttgcggttctgctttctgcttgtagcacaaccaccaataccgcaaagaatatgcattctgagacgcatgctgtgggcaatagcgatagctcttcactgcaagcctctcaggatgaatttgaaaatatggtgcgtaacctcgacgttaagtcgcggattatggatcagtatgctgactggaaaggcgtgcgttaccgcctgggcggcagcactaagaaaggcgtcgactgttccagctttgtacagcgcaccttccgtgaacagtttggtttagagcttccgcgttcaacctatgaacagcaggaaatgggcaaagcggtttcacgcaataacctgcgtacgggcgatctggttctgttccgcgccggctccactggtcgccatgtcggtatttatatcggcaataaccagtttgtccatgcgtctaccagtagcggcgtcattatctccagtatgaacgaaccgtactggaaaaaacgctacaatgaagcgcgtcgagttctgagccgcagttaatcttcatcaggcagcacctcccttggcttacctgatgagacgacataaaaagcactgcttcagcagtgcttttgcttattatcccttctgaacccgttttgccgaatggcgacgtgtggcgtcttatccagcctacaacacacgaacgtaggcctgataaacatagcgccatcaggcattcaggtcgtttcccccaacggctactgcgacaatacgctttcctgcgcatcacagaaaagcatgactatccggggtaatccaggctatagtcttataaatcaaccagtttaaccggcatccgccttttcaggtcacaccaggaattatgctaacacgcgactcctcttccggtcggaaaatcctgcttacctgtatcattacggggatagcggcagcattacttattggtagcctgcaatttttcctgtcgtggcataaacgggatgttaaatacaatacgctcctttctgatgtacaacattacctggccagctatttcgccgacctgaaagccaccaccgatattcttcaaccgttgacgatcaacacctgtcagcaggttggcgcagaactcacctcaagagccgcttttagccttaatgtccgcgccttcttattgattaaagataaaaaagtgttctgctcttccgccactggcgccatgaatatgccgcttcagcaactggtaccggatatagatatccgcaaagacgttgctatggcgattctgcccggcacgccaatgatgcccaacaaaccgacaatggtgatttggtatcgaaacccattattaaatgacagcggcgtattcacatcgctgaatattaacctgacgccctacttactctataccacgcgccaggatgattttaacggcatcgcgctgattgtcggcaataccgctctgtcgaccttttcttcgcgtctactgaccgtcgcggagctgccgggcacgccatcacgactggcaactatcaacggcctgccgcttaaaatacggctttatgccgatagctggacctacaatgacttgtggtatgcgttgatgctgggctgcattagcggcatcgtagcagggtttatctgttactttatctatgccctccggacgcgaccgggcaaagagattttaacggcgatcaaacacgagcagttttatgtggtttatcagcccgtcgtcgatactcgtacgctgagcgtcaccgggcttgaagtcttactgcgctggcgtcaccctacggcaggcgagattccgccggatgcctttatccactatgccgaagcgcagcaacttatcgtaccgttaacgcagcatctgttcgagctgatcgcccgcgacgcacccacgctacagaaggtgatgcccgtcggtgccaaatttggcattaacatcgcgccggaacatctgcacagcgacagttttaaagaggatatgcaccggctcagggacgccctgcccgcgcaccattttcatatcgtgctggaaatcactgaacgcgatatgctccagcagtatgaagcggccaaactgttcgaatggctgcattccgccgggtttgaaatcgctatagatgatttcggtacaggccatagcgccctgatttatctggagcgatttactttagattatctgaaaatcgatcgcggctttatccaggcgatcggcacggaaaccgtcacgtctccggttctggataccgtgctgacgctctccagacgcctgaatatgctgacggtggccgagggcgttgaaacgccggagcaggcccgttggctacgcgatcacggtgttaattacttgcaggggtactggattagtcgtcctttacccctaaaagatttcgtgctgtggatgtcggcgccttctgtgcctgaatggtagcccccttacggttttaacggattcacatcagacgcaacgtcacttattattcagcgaaacgcctgccggtttgcagcgggcaatacgataaggaaaccgccttcagatgattgcgcgcgtaatgcttctgcttgtcgcactggttagcgctggcgcccaggcccaggaaatcaaagaaagctacgctttcgccgtactcggcgaacctaagtatgcttttaactttgagcactttgattatgtgaatcctgctgcgccgaaaggcggtcagatgacgctttccgccattggtacgttcgataatttcaatcgctattcgctgcgcggcaatcccggcgtacgtaccgaagccctttacgatacgctttttaccacctcggatgatgaacccggaagctattacccgctgattgccgaccatgcccgctatgccgccgactattcctgggtggaaatctcgattaatccccgcgctcgttttcacgatggcacgcccattaccgcccgcgatgtggcctttacctttcataagtttatgaccgaaggcgtaccgcagttccgtctggtctataaaggtactaccgtgaaggcgattgcgcctttaaccgtgcgaattgagctggcgaagcctggtaaagaagacatgcttagtctgttttcattaccgatcatgcccgaaaaattctggaaaaatcacaagctcagcgatccgctttcaacgccgcccttagccagcgggccataccggattactcagtggaaaatgggccagtacattgtctattcacgcgtcaaaaactactgggcggctaatctgccggtcaatcgtggacgttttaacctcgacactatccgctacgattactaccttgatgacaatgtcgctttcgaggcgtttaaagcgggcgcatttgatctacggctggaaaacgacgctaaaaactgggcaacgcgctatatcggtaaaaatttcgataatcattacatcattaaagaagaacagaaaaacgagtcggcgcaggacacacgctggctggcctttaatattcagcgcccggtatttaaagaccggcgggtacgtgaagctgtcaccctggccttcgattttgagtggatgaataaagcgctgttctataatgcctggagccgaaccaacagttacttccagaataccgagtacgccgccagaaattaccctgacgccgatgaactggtattactcgcgccgatgaaaaaagatcttcctcctgaagtcttcactcagatctatcagccgccggtctctaacggcgacggctacgatcgcgaaaatcttcttaaagctgacgccttgttgacgcaggccggatgggtgatcaacggacagcaacgggtcaatagcgtcaccggtaagcccctgacgtttgaacttctccttcctgccagcagtaatagccagtgggttctgcccttccagcataatcttcagcgtctgggcattacgatgactatccgtcaggttgataattctcaactcaccaaccggatgcgtagccgcgactatgacatgatgccgaggctatggcgggcgatgccctggcccagctccgatctacaaatctcatgggcgtcggaatacattgactccagttataacgctcccggcgtacaaagcccggtggtggataaactgatcgcgcaaattatcgcagcgcagggtgataaagcgaaactggtgccgctgggacgggcgctggatcgcgtgctgacctggaactattacatgctgccgatgtggtatatggcgcaagacaggctcgcctggtgggataaattctcccatccggcgattcgcccggtatataccatcgggttagatacctggtggtatgatgtcaacaaagccgccaaactaccggcagccaggaggtagtaagaatcaatgggcgcctatcttatccgccgtctgttactggtgatccccacgctatgggccattattaccattaacttttttatcgtgcagatcgctcccggcggccctgtcgatcaggcgattgccgcgattgaatttggccagggcggcgcgttgcccggcgccagcggcgaaggcgttcgcgccagtcatgcgcaaaccggcgtcggcaatatcagcgacagccattatcgcggcggccggggactcgatccggaggtgatcgcggagatcacccatcgctacggcttcgacaaaccgctgcatgagcgttatttcaagatgctacgggactatctctcttttgacttcggcgacagtctgtttcgcagcgcatccgtactaacgctgatcaaagatagccttcccgtctccattaccctgggattatggagcacgctgattatttatctggtgtctatcccgctggggattcgcaaagccgtccataacggcagtcgctttgatgtgtggagcagcgcgtttatcattattggttatgcgatccccgcctttctgttcgctattttattaatcgtcttttttgccggcggcagctactacgatatctttccgctacgtggcctggtctcagccaactttgacacattaccgtggtaccagaaaatcaccgattatttgtggcatattacgctgccggtgttggcgaccgtcatcggcggttttgccgccctgacgatgctgacgaaaaattcgtttctcgacgaggtgcgtaaacagtatgtcgttaccgctcgcgctaaaggcgtgagtgaaaaaaacattctctggaaacatgtttttcgtaacgccatgctgctggtgatcgccgggtttcccgccacttttatcagtatgtttttcaccggctcgctgctaattgaagtcatgttctcgctcaacggcctggggctgctgggttatgaagcaaccgtttcgcgcgactatccggtgatgttcggtacgctttatatctttaccctgattggcttattactgaatatcctgagcgatatcagctatacgctggtcgatccacgcattgattttgagggacgataatgccgcgattaagcccggtcaatcaggcccgctgggcgcgtttccgccataatcgccggggctactggtcactatggattttcctggtcgtgttcagcctgagcttatgcgcggaactgattgctaacgataagccattgctggtgcgctatgaaggccagtggtattttccgctggtaaaaaattacagcgagcgcgatttcggcggcccgctggcgacaacggcggattatcaggacccctggctacaacggcagcttgagaatcggggctgggtgttgtgggcccccgtacgctttagtgccaataccattaattttgccaccacgcagcctttcccctccccgccttcggcgaaaaactggctgggcaccgatgcgaatggcggcgacgttttcgcccgcatcctgtacggcacccgcatttctattttattcggcctgatgttaacgatttgctccagcgtcatgggcgtactggcgggcgcgctacagggctattatggcggcaaagtcgatttatggggacaacgtctcatcgaagtctggtcggggatgccgaccctgtttctgattattttactttccagcgtagtgcagcctaacttctggtggctgctggccataaccgtgctgtttggctggatgagtctggtgggcgtggtgcgcgccgagtttttacggacccgcaattttgactatatccgcgccgcgcaggcgcttggcgtcagcgatcgtgacattatcctgcgccatatgttgcctaatgcgatggtcgctaccctgacatttttaccgttcattttatgtagctccatcaccaccctgacgtcgctggattttctgggattcggtctgccgcttggctccccttctctcggcgaacttcttttacaggggaaaaacaacttacaggctccctggctggggatcgccgcctttctgtctgtcgccattctgctatcgctgctgatttttatcggcgaagcggtacgcgacgcctttgatcctgctaaggcggtataagatgacatctccattgcttgcgattgaaaatttatcggtaggtttccgtcagcaacagcacgtgcgccctgtcgttaacgccatttcgttacaggtgaacgccggggaaacgctggcgctggtcggcgagtcagggtcagggaaaagcgtgacggcgctttccattctgcgtcttttgcctacccctcccgccgtctacctctccggcgatattcgctttcacggcgaatcattgcttcatgccagcgagcagacgttacgcggcgtgcgcggcaataaaatcgccatgatttttcaggaaccgatggtttcacttaacccactgcatacgctggaaaaacagctctatgaagtgctgtcgctccatcggggaatgagtcgggaggcggcaagggcggagatgatcggttgtctggatcgggtcggtatccgccaggcgagccagcgtctgcgcgattatccgcatcagctttccggcggcgaacgccagcgcgtcatgatagccatggcgctgttaacacggccggaattactgatcgccgatgagccgaccaccgccctcgacgtctccgtacaggcgcagatcttatctctactgcgggaactccagcgcgagctcaatatgggattgctgtttatcacccataacctcagcattgtaaaaaaactggcggattcagtggcggtaatgcaacacggcaagtgcgtagagaaccaacgcgccgacacgctgctctccgcgccgacccatccgtacacgcaaaaactactcaacagcgaacccactggcgatccggttccgctccccgccgggcaggcgccgttgctggaagtggacaagctgcgcgtcgccttcccaatccgcaaaggcattctgaagcgcgtcgtggatcataatgtggtggttaacaatatcagtttcaccctgcatccaggcgaaacgctgggtctggtcggcgagtcaggatcgggaaaaagcaccaccggtctggcgctgttacggcttatccgctccgaaggccgcatcgtgtttgacggtcaatcgctggatacgttaaaccgccgccagcttttacctgttcgccaccgtatccaggtcgtattccaggacccgaactcatcgctaaacccgcgtttaaacgtattgcaaattatcgaagaaggcctgcgcgtccaccagcctacgctttcaggcgcgcagcgcgaacagcaggtgaaagcggtcatgatggaagtcggcctggacccggaaacgcggcatcgttaccccgctgagttttccggcggccagcgtcaacgtatcgccgtcgccagggcactgattttaaaaccgtcgcttattattctggatgaaccgacctcatcgctggataaaaccgttcaggcgcagattcttgccctcctgaaatcgctccagcaaaagcaccgtctggcctatatcttcattagccacgatctgcatgtagtacgcgcgctgtgccatcaggttattgtgctgcggcagggggaggtggttgaacaggggcaatgcgagcgcgtgtttaccgcaccgcaacaggcctatacgcgtcagctactcgcgttaagctgacgcctaaaaaggattattgttagaaaaaggttccgctatcgccacgccgaaatttttcagccgacaggtggcggcaaactcatcctgacgattaacgaacaggcacggctccccttcgcactccagcacggagcaaggaacttcaatatcgcttagcgcctggctgagcttatgcatcactgaccacgcgctatcgcctgccggactcaacagtttaagcgccaccagactattctcggtgctctgcccgttttgcggaatcggttcaacctttgaccccgcaaaacccgccgaccagcgatagttttgcggcagacggtgaacaattgagagctgtaatgtattcactttctttccccggaagcacaattacttcacaatttacttacatttatattaacacatcattgacaacccgtccttaaacagattgctaacgcccttctctccgtcagtggctctacagcaagcgggagttaaaatagttttaccgacacggagatagcggcgggctatatgtacccgtttctgcgatctaactcaacctttttaactacaatgatgtgactttttacataaatggattttacataaaataaacataaaggaggaaaatgatgaattggtaattgatatacatcaactatgaaagccgtttggctttgccatcgtgtagcggatagcatcccccaacgccgcctgcgcattcttcggcgccattgagggacagcgcgcccgtcaccgttttttgggacggctggcgtagagataaaacagaatggaacaggcggcgcaaagcgcaatcgaccagatcatcggccacgcactgttaaaggtagccagcgacagcaacgcgccgacgatagcgccaataccaaagcggaaagtgcccgccaacgaagacgccgttccggccatatgcggaaactcatccaaaatgaccgccatcgcattggacgaaaccatcgacacacagccgacaaacgccgcaacgccaaccaccagcgcccagaatccaatgcccatcagcgcgctgaaaaccatccacaccgccatcgcaaactgaatccatagcccggcccgaaacatgtttagcgcccctacccgtctgacaaaacggctgttgataatcgtcatcacaaacagaaatacgatgttcaacgcgaagtagtagccgaaatcctgcggcggaacatgattaatttcgatataaacaaacggccccgcgctcaaaaaagagaacataccggcaaaactaaacccgctcgccagcatatagctcagtacgcgtttgtggcgaaacaacgcggcaaagttacctattgtggtacgaatatgaaaaggctgacgccgctcaacgggcagcgtctctttaatcagagcaaagatcatgactgacgccagaatcgccgcaatggccagtatccagaagatatagtgccagcttaaccataccaacacccagccgccgacaatgggcgccattaacggcgctatcgtagtgaccagcatgacaaatgacatcatgcgcgaaaactcttcctttggataaatatcccgcatcagcgcattgatgacgacgcttgccgccgcggccgccaaaccgtgaaagaaacgcatcacgatcagttgatcgatagtctgcgccaacgcacaggcgaccgccgcagcggcaaataccagcgtcccgcccaggatgaccggcttacgcccgaggctatccgccatcggtccatagataagctgacccagcgcaaaccccaaaatataggtgctgagcgtcatctgcgcgctaccggcaggcacgccgaattgcgcagaaatcaccggcagcgctggaagatacatatcaattgacagcggcattaacatggccaacaggccaagaataaagacaatggcaaaggaagagtgctgccgggtggtcacatcgaactcctgaatttaacgagatagttagccgacgctggcgatttcttcttcagtcaacgggcggtactcgccgggagccagattctcatccagcgtaatggcgccaatccgttcgcggtgcagttccacaacgcgattgcctactgcggcaaacatccgcttcacctgatgataacggccttcgctgatggtcagacggacctgcacaggtgttatcacctccagcgtagcgggtttagtgagatctttttcattatgcaactgcacgcctttcgcaaattgcgctgccgtatcgtcggccaccggcgactccagggtcaccagataggttttttcacagtgatggcgcggcgacgtaatgcggtgcgaccactgaccgtcatctgtcattaacaccagaccggtagtatcgatatccagacgtcctgcggcatgcagcttatacgccaccggctcatccaggaaatacagcaccgttggatgatcgggatcatcggttgaacaaacgtatccctgcggcttgttaagcataaaatagcgtggcccgtgttgctgcgctaagggattgccgtcatacgcaaccgcatgttctgggagcagtttgaaggccgcatttttaatgatgtcgccatcgacggtaacgcggttaccacgaatttcacgcccggcaatagcgcggctgacgccaagctgctgagcgataaatttatcaagtcgcatgtgtgtgatttagcctgtaataatacggaaatcgggcattctacccgaaaaaagggaattgctatccgctcagtatagcgggctaactatatccctcaagggaaatgattcatggcatactattcccggaaccgtttaacgtagtgagaccatgatttttacactccgcccctaccagcaagaagccgtagacgccacgctcagccactttcgccgccaccgtacgcccgccgtgattgttctgccgaccggcgcaggtaaaagcctggtgatcgccgaactggcgcgcgtcgcccgcggacgggtactggtgctggcgcatgtgaaagagctggtcgcgcagaaccacgccaaatattgcgcgctggggctggaagcggatattttcgccgccggactcaaacgtaaagagagtcagggcaaagtcgtgttcggcagcgtacagtcggtggcgcgtaatcttgacgccttccaggaggagttttcgctgttgattgtcgatgaatgccaccgcatcggtgacgatgaagacagtcagtatcagcaaatcctcactcacctgagtaaagttaatcctcacttacgtctgcttggactcaccgccacgccttttcgcctcggaaaaggctggatttatcaatttcattatcacggtatggtgcgcggcaacgacaacgctctgtttcgcgactgtatttatgaactgccgctgcgctatatgattaaacacggctatctgacgccgcctgagcggcttgatatgccagtggtccaatacgatttcagccgcctgcaggcccaaagcaatgggctgttcagcgaagccgacctgaaccgcgagctgaaaaagcagcagcggattacgccgcacatcatcagccagattatggaatttgcgcaaacgcgcaaaggcgtgatgattttcgccgccacggtcgaacatgcgaaagagattgtcggtctgcttccggcggacgacgcggcgctgattaccggcgatacgccagggcccgagcgcgacgcgctgattgataatttcaaggcgcagcgttttcgctatctggttaacgtctcggtactgaccaccggctttgacgccccacacgttgatctcatcgcgattctacgtcccacggagtcagttagtctttaccaacaaattgtcgggcgtggtctgcgccttgcgccgggaaagaccgattgcctgattcttgattacgcaggcaacccgcacgacctgtatgccccggaggtcggtagcccgaagggaaaaagcgataacgtccctgtccaggtattttgcccggcctgcggctttgccaacaccttctgggggaaaaccactgccgacggcacgctgattgaacactttggccgtcgctgccagggctggtttgaggatgacgacggccatcgcgagcagtgcgattttcgctttcgcttcaaaaactgcccgcagtgtaatgccgaaaacgatattgccgcccgacgctgccgggaatgtgacgccattctggtcgacccggacgatatgttaaaagcggcgctcaggctcaaggatgcgttagtcctgcgctgtagcggaatgacgatgcagcatgggcaggatgagaaaggcgaatggctgaaaatcacttactatgacgaggacggcgcggatgtcagtgagcgcttccgcttgcacacgcccgcccagcgtaccgctttcgaacagctatttattcgcccgcatacgcgcacgcccggcgttcctttacgctggatcacggcggcggatattgtcgcgcagcaggcgctgttgcggcatcccgattttgtggtcgcgcggatgaaaggccagtactggcaggtgcgtgaaaaagtgttcgactatgaaggccgcttccgccgggcgcacgaattacgtggttaattgtacttttcattgatgtaacggcgatttgagtatagaatcccgcccgcctttgcatacgcaaagcagatcacttacctgttgctgggtcgcctgtagcaggaattattaaagagagatttaaatgtttactatcaacgcagaagtacgtaaagagcagggtaagggtgcgagccgccgcctgcgcgccgctaacaagttcccggcaatcatctacggcggttctgaagccccgattgctatcgaactggaccacgaccaggtgatgaacatgcaagctaaagctgaattctacagcgaagttctgaccctcgttgttgacggtaaagaagtaaaagttaaagctcaggctgtacagcgtcacgcttacaaaccgaagctgactcacatcgacttcgttcgcgcgtaatcgcctggaagttgaagaaaaaccccgccccggcggggtttttttatgcgtttaattgaatttgacgacatgcagagcaacgagaacccactttgcttttctgctttcttacacctcgccacattcaattagcgcctcccctaatcgaggatctgtagtttccgccgcggtattcatacctttaagccgattgaataatgcccgttgacgaacgctggcactttccggtttccatggcaaaattcgtattggtatcgtttgcccatcattcaacgcatcaaataccttttcattggtcagtaagtcgccgcagctccatgtcttgctatcaaactgaaaatcaaataagacatggagttccagttcatctacacgcacttgacgctttgcattatcgatgcgtatttccaccttctctttatgcgtcaaagttgcatcaagattgagtccataccgtttcaactgccccttgtcgtaatagtaacgtatgctggaccaggttgatttaaaagcaaatccagtaatgaataaaccacttaacaagaacagcgggcatatgaacaagctcagtaaccagttggtgccataagtataaaacagtaccaacgagagaacggtgaacaccatgccgagcatcaacatcatcaaaaatgcgacaatgtgcgcatacaaaacctgccgaaataaactgaaattaacaggcggcctctgacgtattcctttactcactacggcgtccttttatgtcgtatgcctttatttcccgcccgacgtgcgtcgctgcaactgatcgcgcaaattcggcggcgtccctttgatagtcagggtatcggtcgccgggtcccagaaaatccgctcgcccagtagcatcgcatcaaagttaatcgttaacccgccgccgctgccggcatatttggttaactggcgtagcgtactgcgatctgccgggaagctctcttccagctcatagcctttttcggcggtaaattcgctgaagctgacttcactgacgccggaaagctctttagacagcgattccagctcaatttcttccccggcttgtaattgctcattgcagtagctgtacacctgctggcgcacgttctgacgttccgctttatccaactgcgcttctgcggtgaaatcatccactgcctgcaacaggccgcgattctgcgctttggcgttcaacccttcgctggcgccgaggaaatccataaagaagtcagcgaccttgcgccctacccgacctttgagaaacgtcagatagcgggtcgattgcggattagtttcccactcggtaagatcgatacgcgccacgatatccgcatggttgatatcaagataatgcgtcgggttaatgtccagattttcattgacccgcatactactcaggttgttcagtaccgtaaccagcagatactccaccgccaggtaacgataatggcagaacaatacaatgccgccgtccgcaaagggatatttcgccagttcgtcacgcaggcgtccggtcgccgcccggctaaaggcaagaaaatcttcttccccctgacgttgcaaccgcagcgcttgcgccagttcactctcttcattaaacaggccatacgccttattcttggcgctatagacccgatgcagttcagccaccatctcgacaacggtggttgtcggctccagcaatgaatcgcgcaagaccagctcaagattttgctcatcgcgcttgataagctggtgcagggcaatctggttgatatccagactcatgataaactctcctttaagaccgggcggtattcaaccaccgcctgccggaagacgcaagcaatcgccctgtcatttcaggcgttatccgtaacgcgaatgatttaggggataaaaatgcagaaaaaaaactgttgctacggtaatatgttgccctttcatgaacaaacagattttgatttatgccacaactctcccgctatagtgatgaacatgttgaacaactgctgagcgaactgctcagtgtactggaaaaacataaggcgccgaccgatctttccctgatggtgctgggaaatatggtcaccaaccttatcaacaccagcgttgcgccggctcaacgccaggcgattgcgaactcttttgcccgcgccttgcagtcttcgattagcgaagacaacgcgcactaaaaagccgactccggagaaacaagcgacaggtatggtaactcatcgtcagcgctaccgtgaaaaagtctcccagatggttagctgggggcactggttcgctctgttcaatatactgttggctacgttgctcggcagccgttacctgtttgtcgccgactggccgacaacgcttgcgggtcgcatatactcctacctgagcattgtcgggcactttagctttctggtgttcgccacctatttgcttattctttttccgctcacgtttatcgtgatgtcccagcggctgatgcggtttttatcagccattctggcgaccgcgggtatgacgttgttgcttatcgacagcgaagtctttacccgtttccacctgcatcttaatcccattgtctgggagctggtcatcaaccctgaccagaacgaaatggcgcgcgactggcagcttatgtttattagcgtgccggttatcttattgattgagatgctatttgcgacatggagttggcaaaagctgcgcagtctcacgcgccgccgccatttcgcaaggccgcttgcggcattctttttcgtctcctttatcgcatcgcatcttatctacatctgggcagacgctaatttttaccggccgattaccatgcagcgggcaaacctgccgctctcttatccgatgacggcgcgacgttttcttgaaaaacacggtctgctggatgcgcaggaatatcagcgccgtctggtagagcaaggcaatccggaagcggtctccgttcagtacccgctcagcaatttgcactatcgcgatatgggcaccggtcagaatgtgctgctcattaccgtagacggcctgaactattctcgctttgagaagcagatgccggagctggctacatttgccgagcaaaacatcgacttcacccgtcatatgagttcagggaataccactgataacggtattttcggcctgttctatggcatatcgccaggctatatggatggcgtgttatccaccagaacgcctgcggcgctcattaccgcgttgaatcagcaaggctaccaactgggactgttttcttcggatggcttcgccagcccgctttatcgtcaggcattactgtccgatttctcgatgccggcagcgcaaacgcagtctgatgcgcaaacggccagccagtggatagactggcttgggcgctacgcacaggaagataaccgctggttctcatggatatcgtttaacggtactaatattgatgacagtaaccagaaaaattttgttaagcgttacgccagtgccgccagcgacgtggatgcgcaaatcaatcgggttctgaacgcgctgcgagaggccggtaaattcgacaatactgtcgtgatcattaccgcaggacgcggcataccgttgacgccggaagaaaatcgcttcgactggtcgcaaggtcatctgcaagtaccgctggtgatccactggccggggacgcctgcgcagcgtattaatgtgcttaccgatcataccgatgtgatgaccacgttgatgcaacgcctgttacatgtcagcacgccagcgaacgaatattcacagggccaggacatctttaccgttccacgtcgtcataactgggtaacggcggcagacggcagtacgctggcaatcacgacgccgcaaatgaccctggtgctcaataataacggtcattatcagacctatgacttacacggcgagaagatcaaagatcagaagccgcagctcagtctgctgctgcaagtgctaacagaagagaaacgttttatcgctaactgattaattataaatcagttagcaccgtttccccttgcattcgcgttggaaagaggtagtattagcacccacaagtcggcacgtagcgcagcctggtagcgcaccgtcatggggtgtcgggggtcggaggttcaaatcctctcgtgccgaccaaaattcctcgaagaaccagcctgttacggctggtttttttatgcctgttttctgaacggggaagcaacggggaataatcggggaaaaaccccgacacaaaacatcgactttaccgtaaagtttcaactattcacatcaccgggcagtcatcaaactccgcgttcctggcatcattaatgatgtacgtgataactccaaatattgcgtgtgaagaattgtagccatcaccatcttctggcagcgcttcctttctcccgttctccagatttatcaggtggggctgagggtgagttcggtatcgcttgatcctgaattccccatctatcgcgcatatcagcagcgagccatcacaggctgaaagcgacgcgtccacaacaagtagcgccccctggattatcccttccctgaaatgtgaacgcgatgcccgcatgaaataagtcgctgcgggctggctgattagctgctgatcgagggagatccttgtttcaacgtaatcactggcaggtgaagggaagcccatggctatagtcctccgtttggattgaacagctgaaaggtaggtctccccttcctgcgttgatacatcgcggaatgttgtcacataccactcgatccattcgttagcctgcttcatcgtccagttccagttaaccttgctcagttgctggacaaaccgctgtgtggtgacggtcttccggccattaggttcctgctgtatcgaagcataccaggctatttcaatattgatggtttgcccggagcaaaagatatcattctgggagaattgactaagagggttcaccggatcttccccgatgctgatgttcgggttaaaccgatgatgacactaccggcgatcaatactgacgccagcaagcatgagaaggaacagataagccgtactgttcaggaaatgtttgaagaggctgaattctggttagtgagcgagtaaagtttttcaatatccgccatagttacgttttgatcgcgctgtggcggattttcattttcgtaaacgttcccttttcccattctcaaaatttacagggtgcgattgcgaatgtgtccggtaccgcttaatcctgaactcctctccatctatgcaaaccagcaatgagtcgtcgcgtggcgaaacggacgtatcaataaccagcaagatgcgctggtcagtgaccttctttgatgtagttgatgtagttgatgtaacaggtcaattttaggtgacgacttttataaaaaagtctatcatccattatcttaatttcgtcttgtgtggcaccttggaattataggtaaaaaatgatctacaagaaattcagactcgatataaatgggctaagagcttttgcattgataagtgttgtgctgtatcacttcggtgtaccttatgtgtcaggtggctttataggtgtagatgttttctttgtaatttctggttttcttatgactggaattgtccttgaacgcgtagaccacaaaggagtacttgatttttatattgcaagattcctaagaattgtaccagctctggtatttgcaattctcttgttgatgattttcggtttatttacactaagtacaaatgaatacgaagcacttagcaagaacgcaatatcgtctttacttttttattcaaataattattacgcaattcactctagttatttcgactcatcatcagagttcaactttttgcttcacacctggtcactatcagttgagtggcaattttatattttatatcctttattagtcattatagttaaaaaattacggtttcctgttggactctcattatctgtaattttagccatgtcacttgcaattacacttatgcgagtgactggaaccaaagaagatattttctatcttatccctaccagggcatgggaaatgctggctggcggccttgtatacatagcatctgtacgttacaaaatgccagaatggataaagcattgtgaggtttatgggatagtcctcattgttgttgctgttgttatactgcacagtaatggttactggccaagctattcagcactcgctcccgtgctgggtgcttcgatggttattctggctaacaaacagaactctttattcacatcaaacagaattgcacagtgggtgggtaagatttcttactcagtttatttatggcactggcctgtaattgtagcgatgaaacattatgatattgagttcagcgctataaatattttctttggtgtaattgtgtcttttgcgcttggggatatttcatacagaacaattgaaaacacgctcaggaaacgagttaagctacaatttaatattgtattattttcctctactctggctctatgcttgtttgtcatgttcacaaaaggtgttagttttagattttcagacaccctaaagcaagtcgttgagtatcgtatggacaactctccctggaggcctgatatttgcttcctcaatccagatcaagattattcagcattctcaaaatgtcaggataaaatgactgaaaagtcttttgttgtatggggtgactcgcatgccgcacatcttatgccagggctgaaatcggtatttggaaattcacttaacattacgcagagaactgcaagcttgtgcccaccaatcattgggcttcaaaaagatgacaggccgtattgcaaagacatcaatgatatggtagccaaggaaatttcagacaacaagcctactacggtattaatgtccgcgttgtggcctgtctatcctatgcgtgattatctgcctgagactattaaattcctgaaggataacaaagtaaaaaacatcatcattgttggcccgttcccggtttggaagaaaacgatgattgatactattgaggatatggggattaattccggaaggaccgttccatggagcatgacggatgaaacccgtaatctgagagataatgacaaatatcttagagagctggcgaaagagcattcccttacttatatttcaccacttgagactatgtgtacagaaagttattgcaaagcaataatagggaatagaattgcttaccctatacaatatgacaatgcgcacctaacaccagaaggctcagggtggtttattgaggaagtgaaaaagcagatttcaaaataaacagaggggcttgcccctctttttattttataaaactacaacaataatgcaaattattttatgtgtatagcttttctgatggggcatgctatattttgtgcaaccgatgtatcaaccgctttcagcgcatcgagataatccagccacagattgtactgcgccagttcgtcgcccgtcaggcgcccgagcgccgctttgcccggccaccgcctgctgttcatgtgctcgttggcctgatcgattctcttcttcttttcctgatttgcggcagaaattaaatcatcttgcgttggaggtggaatacaaacccaggcaatacgtccatttgatgaaccgagatacattccctttggtggagttttcatataatacttatcaacttcttcatcggtcagagcataaaaatcattcgaccacaacccactggccttataagctggaatgttctcctctgaaaaatatgtgtttgatgtcgaggaaaaacatattatgctcatgtcaataccccatgtaaattacagatatggaattatcgccaccggatggattaaatatacgaatagcaccgttgttctcaatcaaatatgttggggatatcgtaatatcaccttgtgcatcctgaggggtaagcgtggcagccttgaatacataaggaaatgttgttggtaatggaaaaacataccctgaagggctattcccgggaacaaagcaatttaaagcctgaaagattgcgccaccgggcagagaggtatagatcccggcagggttgtccctgagaacaaatgaagaaatgtccgggttctgattcgcgccgttgcccacgtcccgttgtgcggccgatttcaattgaacgtttcgagcacatgatttttatctatttattcagatattccggccagttaatatcaggtgcaacatctagcgccagtcggcgcagctttgttcggtattcacgtagcgcagtgagttcggacaattcagcagccgttatatcgccatcgtcctgagcttctacaagctgattgatttttgctgtgaccgacgtcatacgcctgtcgcgctctgccgtagctaaagcaacataatcaatctgaacaggggcaataacgccgttgctgtaggtaaaattcccaggctgaaaaccatcgggaatatcagtatcagcgaattccacaacagagcaattcagcggaaatagcttagtcgcatctttatccgcagcaataatcagccctgttttgtcatactggattttcagcgtatcgggctggaataacttctgtaacacataccagtcaacacctgattcatcctggataaactgaatactgcaattctctgataatttctgctgaacaagggttaattccgttgttttagtgaaatttttaaaatgcctcatttttatgctcccaccgtataccactggccattcactttaagctgtaacaggcgtcgttggatcctgtctggtgtatcgttcgagtctccattctcaacacctgtaatgacgtaacctaactggtctgcaaatccgggcgaacgatataagtttccatgctcaacggcaccgaatcgaattgactgaacatacccactcagcatgtcagttgtagcaaggaatacaccagacccatcatcatgaagcataaatggctttgttttgtcgttctggtacacaccaaccatggtgatgtactgacgcgctggcttagaagccacaaacgcgctcagccagcccggtccgctaccaccgccccatatatcaccgtatacatcgccatttttgttgaatatcgcacttccagcctgcaagttttcagcagctgcgataacaccgagtcgggtgctgatatatgcccggatagccaggtcttctgagttctgaaatccgataccattccatgacttaatgttcagattgttaccattaaaacctgcaccatcaacgtcacctttagccatcccaccagtgccatccccaaccgtaaccagggtatcgccacgcatatttggtgcagaaataccccccgtaaaggcgcccccctccagcatcgccacttgacgccatgaggtaatacccgttcctgttccgtgaccaaacaatacgttattgccactgactgcaagaacatccacaacagtggtcggacttaccacctcgctaagggtaataatttgccagaaacttacctggtctggcgcgtcgggggcctgatgcgcacgcataaactgacagcctgtagccgcacgcgcgccgattgatgttcggtcaattgcgtcactgacaaacgttcccgcgaggaatcgcccgtcacctttaaaaagaacgtctactaaaccaacgttctggagaaacagcggcttattcgggatgtccgcgccattctgatttttttcaagacgggttttaacctgttcatagatcaacctgccaatggcggcgtgaagctgcgtatgttcgcctttactgagtggtatgccggcggcttcaataacagtacagacctcttcctggactgcatcccacatatcactgttgagatccgttgcgcggcggcccgtggcgggatcaccattcgtaaatccgtttttcccctgaccaaatttatctttttgcgcagtgggcgtatcaattctgtgcattctcttttccttccggataagcaaaaacaacaaccgtatgtgacggacaaagcttatcaatcacacattcagcaacagtatcgccccacgttctgatcgcagaatcgcaggtgcttgtacaggtctgccatccagcagacgggaaaaacgggtaatctcacgaatcaccacaccatcctcgtcctggtaccattcctctccgtcgcgggcgacgcgaaatgcaaaagaggactggttgatatccccgcgctgcattggtgccaacaccagatcacggattgtctgagtttctggcgcggtgatgtcataacgcagcccccgctcatcaaccgtcagtgccagcgtgcccgcacttctgcgacccaggataaaattggggtcatggttgaacaacgcccgtacatcgtcattcagcacttcatcaaacgcaccgggccggatgatttcgcgaaacgaaccgaaaatcagttcagaacgactgtcaaagaccgaaccatacccgatgatccggctgggctcgctgtcgtgcgtttctgcgcgcacctcgccgctgtaacagcgaatttcacgttcactcatcttgagtgttctcctagattgtggttttggctggccgggaggcgttgacgctgaccagcatttcatcaaggccgtctttcggattcatgtcctcaaacgcgcgtgcttcgttgcggctcatccatccgacatactcaagagcagatgcaaaggtcagtgtcagagcgccacagagcaaaatctcgagcatttttcgcttccagccgccaccactgccaaaataggcgatgcgcaaaccagccataacaatcgacataatgactgcgcccagcggtgtgtctccacgccaccagctctgtaacaattcaagtaaatcaggccaggtatttgggttatgaggcatttgtagttatctctcacctcgctgatacagcaggtgcaaattgagggaataccacgtaccgcaaatcagaagcggaaacgtaaaagaagccgagccaatcgataactgcgggataggccaggcccaacgaatcccaggcccagaaacgacaaaacccgctcgacggcgggtttaagctgcgtggcaaagtaaccactcttagcagattacaagaatttttgcggaccgcgttaatgatttttaatcccaaagtcgtattatgcgttttttactgtaggagttaacaggcttatattatgttagaaacactatcattcactgaacgtgacgagttccaacgaagaaacatcgctgaaaatatcatcaaattgctaaaaccagaggcagacatttcaccactggtaatagacggtgcatgggggacagggaaatcagaatttagtatcaaactgaagaatctcattatcgagcaagaaactgagtctaaagttgtctatgttgatgcctttaaaggggatcatgcagaatctccattacttctaataacatcagctattgcgagcattttgccggaggaggaaaaacaaaacttcattaagagatctcttcctgcaattcgatttggtttaaaaactgtactaaaagctggtgcaggttggtttttacgacaggaggctagtgaagttgccgaagaattccaagatgcgatgaagaaagcaagcaatgcagcaatagatgggactattgaaaatatacttgaagaccacatggaatcagagaaaaacataaactctctaaaatcttgcattgaagatatatcaaacaagcaaaagatagtgataattattgatgaattagaccgatgtaagccaagtttttcaacaaatatcattgaaacaataaaacacatctttgatatcaataacgtattttttattttagttacaaacactgaacaactaaaagcatctataaatcatatttatggttatagcattaactcacaaaagtatcttgacaagtttataaaatataccattactcttccagacacatgcttaataaatgggcataacgtatgtaaaacctcggttatatattgggatcaccttgtaggtgaaactacattactaaataaaatcaacagcttagttggtagctttatttgtgatttaattcaacgaaccaacttatccttacgtgaaacacaaaccttttcacgcaatcttaacattttccgactgttaaacgacaatgagtgcaaaagcaatgatccttttataaatatgatcgttgtcgtagctgtcttcatacattgttttggtgacaaggaaaaactaaaacaagaaattaccgctgaatctatatcttatttagcagacctgcttaacataaaagaaataccttattcttatgagagaagatcgcaaatccctgaaatatcaattatattcttcggaataattaaagacagcattactcttaatgagcgatttgcccctaaaagtgatgaggaacttaaaaagttcacaaatgtttatactgattatgaacacctaaaattttggagcactactcccagagagttaatgataaaatatattaatcaaatgtcattcatccagtaaataatacgcccctgcatggggcgtattattaaacgtccatatctaatgttagatccagcattgaaaggcagccatcaataaatccttcggctaactgtatttctatacgtaccaatttctcatccttcccacgcacctttgcaatcttacgcttggatattctgtataaataatgtgccacaagaagcgaatgctcatcaggccttttttgctttaaacgagcaagacacccctcaacaattaatgcgtcattatcagaacaagccacacgtgtcttgcaggtatagggaagaagccctttaaacccagcagctataggcgaatagtccactcctgagctatcactcgccgcccatgccccccaacgctcaagaaccatctgaatatcacgcatcaactttctccaccaaatcaggccagcacgccaattgccagcgcgcgatcgataaaacgaaatatcaactccagttgagagccgtatttctcttcgaatgccacggtgtccgcatgtaactcattgtgatgcgttctgcacaacggcagcacaaagaggtcatgcgcctttgttcccatccctccctgaccgtagcctatcaggtggtgcggatcatccgcctgcttcccgcagcaggtgcacggctgggatttaacccagcgggtatatctctcattgacccatcgacggcgtttcggacgtaacatgaagctttccggcgattccggatcaaccctgagcgccagtacctttttcgccttatcctgtacaatgctggtggccggcaccgagggaacaatttcactttcacgggtagctgactggacaattgccttcggcattcttaatgcttttctcgcagcgctctccggtaagacttctgccaggtcattgcgtaccatccaccagcacagttccgggagagtaactgcgtgcatatcgtcaaaacccagatcacgacaaacaaccgataaaacccattttgtcgtgttctccacagctattgatttcagccgttccgtaaactgttcgcgcagcaggttatcgcagtgccagcacagtcggattgcccccggggcgtggcgcatggttgtcatctgttcgctgtgccagtctgaatgcggccactgacagccattcccccggagtagccagctttccagactatcgagaccaccagcacgatagataaccgactcattacggaacacatcacgaacagcaggatcatccgccagcggctgtgataccgccgggaccgcgccgctggcgaaagatgaaaattgttccggctctggttcaagcagaacacgcccctgcataaacaggggcatcagttccgatcccggcctgaacaatacaacgcccatacgaggagcaatttcaggggtcagtaacgctctcacgatcacctcaatgaacggtatcgagcagcttcagcagctcagggaatttggattcgaagaaatgcggttgcgtctcgcgagggtttgccgggctggtgatgtttttgccgaacatgcagccttttgccgtcagcgaccagaattttttaatgccgttaatcgcggagcgactgtaacgctcacgatgttcaacaacacccagctttgctaactgctgatacgcctgattagccgtcatccggatatttcacctgtacatcatccgtactgtctgatgttgttcgtccgggaatatctttgtcgcaccgcacctcattcacctggtgcatcagttacgacgccactgaacgttcagatagctccccagcatctcctccacaagaggtcgcaggccatccaaaaatgtctttttcgcgctctccatcgctcttgctccgatagtgcgctctgcatcggtattaccgaccagcccagacggtctcagctctgtgtcagacagcatccggtacgtttcctcataatccgatatttgcttttcacgaagcgcgttaacgcgttccggcgctttgcgctccagcactctgtgtaacggcccccactgcagtatccactccctgaactcgcttttttcagcggctttcacctgaagctccgcgtcctgaaggtctgtaaccgtcacgccggatacgtcaaagaaacgcatttctgacgtcacgctggtcagcccgagtgatttcttcagcttattctgatacgccagccagacctcaatttcatcaacgagagccagcgttctgaccttttcccgggcaatctgttccagttttcccagacggaacatctcacgccccgtggcaaccagcgccgcgagatcgttatcgtattgccctttttctgcattatgtaccagctgtacgttcttcatctggtgcaaaaaaaatgtgacccggtcctcgcagcttgaggttgcctctgttgccatagcaaaggtgtttgctcttaacgcctcatcttcagccagttgtgccagccaggacgatatctgtgccttaaaccccgcgtcctttatgaagttttccgtctcactcagtctgtccaggaagaggctgaatgcgtcggcgttatcttcctgtccgaacatatgccatctgtctgcaggagccggttccccctcccgggcaggcaccagccagtcagcggccgccaggtgcagtgcccgagtttcccggggggcggaggctcccgccatatcgaatcgtattatggggcctgaatagccaggcgcgctggtgatctcccgcagcgcctgcaaagtacgttcagacagtgggttcccttccagatttacggttgtctctgaagacagatgaatgagactttccggcaggcgggtcagctggttacgatagaccgacagcgacagtagtcctgacggcagcatcggcaggctggtcagccggttaccagataccatcagctccttcagttctgacggcagcaccggcagactggtcagccggttaccagatacaatcagctccttcagtcctgacggcaacgccggcaggctggtcagccgattattataggcccacagcttatataattctgacggcagcgtcggcaggctggccagttggttatcagataccgacagctcctgtagccctgacggcaacatcggcaggctggtcagctggttattataggcccacagcttacataattctgacggcagcgccggcaggctggccagttggttatcagataccgacagctcctgtagccctggcggcaacaccggcaggctggtcagttgattaccaaagatccacagcttacatagtcctgacggcagcgccggcaggtgggtcagcgggttactaaagatcgacagttccagtagtcctggcggcagcaccggcaggctagtcagctggttaccagagacctccagcgtccgcagttctggcggcagcgccggcaggctggtcagattattatcaggaataaccagtgtggtaatatgcgcgggtaaacagtctggcaaggtggtaagacctgattctcccacgttaagcactgcattgccattattcaggcaggcacgcattttctgtaccactgctgcacggccgcgtgactcttctgcgggtgcagcccttctccacgctgaccagacagcatcatactctgctggcgtctgtggagccgttgtggcagggaggaaggatgtcctgaatgtcccggatgccccttccgcgtgtcctgtgccctcctcaccctgtgctgtgtccagggtgaggcgatgtgtttcactgtacccctggcaatttacggtatagttcccggcatcatcaagggtgactgacaatatctcctgactgtcttcatccagaatacagaagtaattttccccgtgctggccggaatgaatgctttcctcccatccggcatacgcgagcgtcctgagcagttcaaatctgttgatcacatcctcccgcgtcgttccggccggcgggtgacaaatcgtccagatgcactccagcgcttcagtctggtgcgttgagcaaaaaaattccttcattttttcccaggaactcatttcagggggggtatcagaccaggcaatacgataaatgcggcgattactgatggtggcgggaagacatccgcttccaatatgaaagggcataacaaaaaacctttataaatttacatatagtatctgtccggcagacatcatctcttcctggtcttaatttcacaataaggttatcggcggattcatggtcgtcctgacatggcgggcttcagaaggtgcagaagaaaaatccgttatgatgaccggatggcgggactgtcattttacagctaaagtgtcgattttttcagggtcgctttccacgatgaccagatcatccggtatcaacgcccgggcgttcaattttcgattctgcctgcctgcgcagctcttccggcgaataaaccctttgaacgactttaccgtctttaaactgccagcagcatgaatatcagcgcgacggttttcatccgtatcaggcaactctgcaacgctctggccagcaggccacagcccggaaacatcacgcgtaatacacgtaataacatcgttatcgtcgtaggtaattttcagcgtgtctgctgaaaataattgctggcacccataccagtcctgaccatcctctgatttaagatacgccgcatcggcgaataatgtgtcatctggttccggtgcatacggaatgaaatttttaatatttaaaaactgtttgttctttttattttttttccgctgtcataattattccttcttatacacttggggctgtcacccacgtatcaccaaccagatactgaatgggacgttgtcacccgaatagtcatcgcgccacgcactcccattacctcaatcactgcgccagcgagacagatattaccgcagccagtatccgtgatgattttgttataagcgtaagaccaagagccacgacacatccagtaagggtgattgaatgcgccctgagactccagccagacgataaactccgccgtcgtccacggattatcatcacagccgataataactgcgccatcaaacgctcgcgcggcaccgatacgacgcacaaacaaatccttgtccggaatatcgccgccattctgtgatttttgtaatgcatcggcggcacgacttatggtttctcgcaaaccaacgtattcgataagaccgtcaacactttttcctgacagcgccgtcagggtttcgtccagcggctgcttgcccgccagtttattcagtaccgtggtggcaaagttcggatcatttcccaacgcgtcagccagttcctgcagggtgtccagtggctccagtacggaaccaaccagcgcggcaatcagtttgcggacaaactccgcgtttgttgtctgaagccctttagcatcgcctggcggcgtcggtgtggtcggcgttccagtgaatgccgggctgtccagcggcgctttggtccgtacctcacccataacggtttttaccgcctttggtgtggccgccagcgcttcgctgtcactgtccgtggcactgcttaatttaacgataccttttttcgtcaggcttgcatcttccagggaaatcacgtctgcgatatcctcggcccgtttcgcggcctcttcggctcaggttgccaattctccggctgcagctctgctttgcgctgccagtgatgcgctggtatcagatgcggcggcgtgggtggatgcctccgatgctgatgactaggcggctgccgccgttctggctgtgtcagccgacgccgcgctggctgatgcctccccggcttttgtggtcgccgtacctgcgctgctctccgcagatgctgcggatgaagctgccgaccaaaattccccttgaaaaccagcctgtcagggctggtttttttatgcctacaattaaaaagttagctgatgccagagacgttattttgcatgaactgattttgcatgaactgattggacatctttcctgtgcagtggtcacagtaaagtcaatgcaggcaactaacgtaaaccatgtttgtactaaaacagaaaaagcgcatctacaccctatactggaaaaaatgtttgcagtggcaggtaaatgagtaagcaatctgtcgcagcaataataaaacgttctggtaaggtaaacggcctaccacgcctttgtcgctaacaattagcctccctgtcgccatagggtcgataacgatcggctattcacaacacgttttgtagacaacgtacggtgattaattactccttcagccagcaactcgctaattgttattcaacttcagaaattataactaattgaagcacctacaaaattatgccctgaatttttatccgtaagtgatccattcgagaaatgccggatataagcttctgtagaaaaagccccaaagttccagccaagaaacgctttttctccaaaggtaaatgcagaattgacacgcatatcatctcgcgacttagattttatataagcccccagaccaataccggtatagataccagcgaaatgaaccagcgccacatccttcgagatacccaatacgccctggttatatttattacagggaacgctgccagaatgtttactgcaatcatcgctacccttagccttaaatcctcctaactccagattatttcttgcctgtaaaaagaaaaaatcgctgggttcactgtatgtcagaaaagccgtatataagtgctcaacccctcctcttcttatactttctcccgcagcaaaagagatctgatgcttgttgcccttgccaaaaaaaacattatcattagcagaacatgcgaatgcacaaggtaataatagatatataaatattctcttcatatacactccaccaccatttcaatgtcaatagttatttttaaccggctaacatatttaaaattttctacgccacgcttacgctcacagaaacggctgatatagcatccacactacgttctccccttgagtcgccccaacgggtgctcaaaacgccgcgagtgttgttcaggcacatccaggataagttataagtgaatgacactcatttctgaccacattttcatttatgataagaatatcgtcagaatctctttatcgcataaaaatacctctgctattgacttaatatttaatttaacagatgtcgcggtttattcgttctgctcagatgtatttcattgacattaataaaaccataaataaattcagttaaaataatttgttaataatgacaagctttagacgctatgacttttaataagaaatttcctgccagtaaagatagtctggacttacgggtgcaagggcgcagcaacatatgccacacttctgttatgtcacattgtccgaaaaaagcgtccagaccagtattcaacttcagggagtattctgttttctctcacaacgggttgttttatcctttctatcgttcagctaattactcgcctgtcacaggttttactacttacccatgcactaattagggtaaaatttacgcgcttgacaatgtggcaaatctggacgatttccgcgctgaaaacaataatcattctaataaaactcaggagatacagcatgcctgaagtaacaccttttcaggtgcttattgtggacgaccatccacttatgcggcgaggtattcgtcaattactggaactggacccggcttttcatgtcgttgccgaagcgggtgacggggcgagtgcgatcgatctggcgaatcgcattgagcccgatctgatcctgctggatctgaatatgaaaggtctgagcgggttagataccctgaacgcgctacgccgggatggtgtgacggcgcaaattattattcttaccgtctcggattccgccagcgacatctacgcgctgatcgacgccggcgccgacggttatctgctcaaagatagcgatccggaagtgctgctggaggccattcgcaaaggcgctaacggcggtaaagtctttagcgatcgggtcaatgaatatctgcgtgagcgcgaacggtttggcgcgcaggaagatccctttagtatcctgaccgaacgagagttagatgtcttgcatgagctggcgcaggggctttctaacaaacaaattgcgtcagtactgaatatttctgagcagacggttaaggtgcacattcgtaatctacttcgcaagctaaacgtgcgctcgcgcgtcgcggcgaccattctatttttacaaacacgcggaatgcagtaacaagccaggcccggtggcgccgcgccaccgggccgtcagggtcttatttctcctgcgccagccggatactgcgctctatcaccgcccgccgggcgtcacccgccggcagtaacttcagcatcatctcccaggccgccaccgcctcgccaaagcgctgctgctcaaaggcgctgaacgcatacaggcttaacacccggatatccgtgtggtcgcggctcaccagctgacgcagcagctccccgccgcggcggttatcctccgggtcggacgagcgcgtcagcgcctccgcgtagcccagcgccgcatcgcggtttttcgggtccagacggtaagcgtttgcataggccccggtggcggtaccggcattacccagtaccataccggtgcgccccagcatgagccagccctcaacattgccggcatcattctgcaggcgggtgcgcagccccagcgccagccgcgccatctcctcctcattcagcggctgcgcctgcgggtccagcgcccgcgccagcagtcccggcgtctgcgccgttgcctgctgccaggccctcacctgcggatagctgccggtctgtgagtaactgatggcggccacgaccagcgccataaccacgcccggcacgtaagcaccccacccggcgcgcggtcccgccgcaggaatggcgtcggccaggacgtcctgtctgatacgcacccgccggcgcgtgcgggcgacgattatccacccgcccgccacgatggtggccagcggcagcacccacagcagcaccgtcagcggggtcagcggcgggtcgtaggtgacaaagttgccgtagcgcgccaccatgtaatcgatgatttcctggcggctcttcccctcctgcatcaggtcatacaccctgcggcgcatgtcggtggctatcatcgcgttcgagtccgcaatgctgttgttctggcatttcgggcagcgcagctgctccgtgagctggcggaactgctgctcctgcgcttcatctttaaacggcatcacgtcggtggtcgcccgcgctgacccggcgataaccagcaccagcatcagcatcaccatgcccggtaacagtctcattgcgccgcctcccggctgtatctgtcccacagcggtttcagttcactttcccatacccgggcattcaaatcgcccgcatggcggtagcggataatccccctgccgtcgatgaggaaggtttccggcgcgccgtacacgcccaggtccagccccagcatcccgtcgctgtccgataaactcagcgcatacgggttgcccagttcctttaaccaggccaccgccttcgcccggtcgtccttatagttcagccccaccacccggataccctgcgcagaaagctggttcaggtactgatgctcggcgcggcaggtcgggcaccaggtggcccagacgttaagcagcaccggtttcccctgcgtcagcacctccgcctgatagtactgacccggcgtctccagtgattccaggcggaacgccggcaccggctttccggtcagcgccgattcgagattcgtcgggtcatccccctgcgcgttgcgcgccagctgccacagcagcgccgcggcaatcagcagaaaaatcagcagcggtaataacagtacgttgcgtttcatccggcctccggcaatggtttacggcggcggtagcgcgggtccgccaggcacagcagcccgcccagcgccatcagcagtcccccggcccatatccagcggacaaacggtttgtagtacaggcgcacggcccacgcgccgttgtccagctcctccccgagcgcggcgtacaggtcgcgggtcagcccgccgtcaatcgccgcctcggtcatcaccatccggctggtgttgtagagccgtttctccgcgtgcagcaccgcctccggctcgccgtggcgcgtcaccccgatgagggccaccccgccgcggtagttgggcccggtgatgtcccgcacctcccggaaggtgaagcggtagtcgtgaatggtcacgctgtcgcccgcccgcatccgcacgtcacgctccacgctgtaattctggctgaaggcgatgccggtaatcgtcaccgccagcccgaggtgcgccgccaccattccccagtagctgagagaggttttcgtgccgcgggacacgcgctgtacggcttcggccaccgccagcaccgcaatccagcaggccatcgccatccccaccgccgtcatggcgatgattttatcttccagcagccatggcaaaagtaccgacagcaccagggtggagaccagggcggtgagcagcagcgtcctgatgttacgcggccggtcccggccccagcgcaccagcggccccacccccagcagcagggcaaaggggaccatcagccaggtgaacatggtgttaaagaacggctcccccaccgaaatgctgcccagccccagctgtttgtgcaccagcggcagcagggtgcccagcagcaccaccagcatggcggccatcagcaggacgttgttgccgagcagcagcgactcgcgcgaccacagcgcgttgttcacccgcgaacgcaccctgtgcccgcgcacggcgaacagcagcagcgagccgccggtgaccagcaccataaaggcgaggataaacatcccgcgcgccgggtcggaggcgaaggcgtgcaccgacaccagcaccccggagcgcaccaggaaggtgcccagcaggcacagcgagaaggcgcagatggacagcagcagcgtccacgccttaaagccggcgcgctgttcggtgaccgccagcgagtgcagcagggcggtgcccgccagccacggcataaaggaggcgttctccaccgggtcccagaaccaccagccgccccagcccagctcgtagtaggcccacgccgagccgagcacgatgcccagcgtcaggaacacccacgccgccagcgtccacgggcgggcaaaacgggtgaacgcgctgtccagacgcccgctcagcagcgcggcgatggcgaaggcgaaggccaccgagaagccgacatagcccatgtacagcagcggcgggtggaaaatcagccccgggtcctgcagcagcgggttcaggtcgcgcccctccaccggaaaggccggcagcgtgcgggcgaacgggccggaggtgaacaggatgaacgccagaaaaccggcgcagaccatccccatcaccgccagcacccgggcgacgatatccgccggcacctgccggctgaacaccgccaccgccagggtccagccgctcatcagcagcacccacagcagcagcgagccctcgtgcgccccccaggtggcggccacccggtaccacaccggcagctgcgtgttcgagttgccggcgacataggccacggtgaagtcgttaaccacaaaggcgtgcaccagcacgaaaaacgcgcccgccacgcagataaacagcagccaggcgaacaccccggccgacgccatcatccgcgcgtcaccgcgcgccacgccccacagcgggtaaacggacagcagcagcgccacgccgagcgccaggcacagcagcgcgtggccgtattcaggcatcatgatgaggtgtccttatcagcgcgttgcgggcggcggtggttttcctgcatcgccttttccacttccggcggggtgtagttctcgtcatgtttggccagcacctcgtgcgccaggacgtggttgcccttctccagggtgccctgcaccaccaccccctgcccctcgcggaacaggtccggcagtatcccctcatagctcaccgtcaccgacccttcggcgtcgtagagactgaagttcaccttcagcgagtccgggtcgcgcctgacactgccgggcatcaccatcccgccgacgcgcaggcgctggcccgccgccggcagctgctgcgtctcgcgcttgccgtagaggatttcgccgggggtatagaacaggtcgatattcgcgcgcagcgcgtacaggaccagggcggtggtcagccccaggcccgccagcaccgcgcagaccacccatagccggtttttacgtcgcaggttcacgcggcctcctgttgcgcctgtgcggcacgcatccgcgcctcgcgcgcccgctgctgcgccacgccgcgcagaatggcccggcgctgcagcaccgtgtgcagcgccagcagcgccagcggcgccacggtcatcgccaccgccagccagacaaaaaaggcgtacccgcccatggcgaaaaaatcgctccacgatgaaaatgccggactcaccggtgcccccttttcagtatcagttcgctcacccacgggcggcgtttttccatcagtaaaatcaggttgcgcatccgcatcagcgaaagcgtcataaagagcagcaggtagccggcgatggcccagcgcagcggcgagcgcatcgccgggtcgatactctgctgcatccgcgtcgagccctggtgcagggtgttccaccactcgacggaatagtggataaccggcaggttcaccacgccgaccagcaccagaatgcccgccgcgcgcccggccattttacggtcgtcaaaggcgtgccacagggcgatgaccccggcgtagagaaacagcagcaccagctccgaggtcaggcgcgcgtcccacacccaccaggtgccccacatcggtttgccccacgccgcgccggtgaccagcgcgatgaaggtgtacaccgcccccaccggcgccatcgccgcgacggcaaggctggccattttcatctgccagaccagcccggtgaacgccgccaccgccatcgccgcatagatacccatcgaccagatggccgccgggacatgcaggtacataatgcggtagccctccccctgctggtagtccgccggggcgaaaccaaagccccggacccagcccgtggccagcacaatgatgccggccgccgccagccacggcacgagcctgccgcaaatctgatacagccggggcggcgccgccagctgatgaagggttttccacatagtcgtcacctgacctcctgaaaccagtaaaatgtccgtcgcgccggggcgctactgcacgctgaggcgcagcgccgccgcggtggcgaacgggcttaacgtcgcgctgcccgccagcagcgctcccagcaccgccagatagccgtcagcgggtaaatgcatcgatgccgcgtccatcgccgcggcggcgaaaatcagcaccgggacactcagcggcagcaccagaatgcccagcaggacgccgccgcgccgcagcccggccgtcagcgcaacgcccggcgcggcgagaaaccccagcgccggcgtgccgagcagcagcgtcagcgccatgattttccagccgtacacgtccatccccagcagcagcgccaccagcggggagagcataatcagcggcaggccggtcaccgcccagtgggccagcaccttcgccagcaccaccgccggcagcggcaccggcagcagcatcagctgctccaggctgccgtcctgcaggtcgtcgcgaaacagccgctccagcgccagcagcgaggccagcagcgccgccacctggatgatgcccggcgcgatacgcgccagcagctgcggctgcggcccgacgcttaacggaaacagggtgatgaccatcaggaagaaccacagcgggccggcgatgtccgcgccgtggcggaacgccacgcgcagttcgagacagaagacacgccacatcacagcccggcccccccgccggtcagcgccaggcggcggacggtgtccgcggcccccggcagcggctggtgggtggtgagaatgaccatcccgccctgcgccgtgtgcgccgccatccgccgggtgaggcgcgccacgccgttaacgtcaatggcggtgaacggttcgtcgagcacccacagcgcggcgcgggtcagccacaggcgggccagcgccacccggcgctgctgcccggccgagagctgagcgaccggcacgtcctcaaatcccgccagcccggcctgcgccagcgcctccgggagacgcgcgccgtcgccggggtggaagaagtgcaggttctcccgcgccgtcaggcgggttttgatccccggctggtgccctatccacagcagactgcgatggaagctgtcgcgcacgcggcgcaggggttcgccctgccagtacacctccccgccgtccgggcgcgccagcccggtcagcaggcgcagcagggtggtttttccggcgccgttgccgccggtgacctgcacccactccccggcctccacggtgaacgacagcccgcgaaacagcgtcctctcgtcccgctcgcagtacagatctctggcttcaagcattcccactcatcaacgtcctgtcagaaacctggtttaacatcacgcatatccggcagtttatgcgcgatccctttgtggcaatcgatacaggtctgtccatcttttaccgcctgatcgtgcattttcgccgcgacgcctttttgcgcggtcagatccataaagtcgaaattgtggcagttacggcattcctgcgagttgttgtctttcatgcgccgccactcattttgtgccattgtcaggcgatgagcttcaaatttctgcggtgtatctatcagcccaaataccttcgcatacagctctttactggctttgatcttacggatcatcttcggcccccactcatgcggcacatggcagtcaggacaggtggcacgaacgccgctacggttgttgtagtggacggtttccatatactcctcatacaccgtgttgcgcatttcatggcagctaatacaaaactcttcggtgttagccttttccattccggtattgaagccgccccagaagatgatgccgccgataaaaccgattaacagcagcgtccccaacgccaggcggctggggctgcgccaccatcgccagacgcgctttatccagccgggtttacggttagaattttccataatgacctcttatttcccgtaaccttgcgagggggtaaaggtattgtcgataatcggcgcggtatcagactgcggtacgtggcactgcaggcagaaataacgacgcggcgcgacgttgcccgacactttaccgtcgctgtccataaagtgcgtcggactgatacgcggcgcgcccgtcgtacgataactttccacgccgtggcattgcagacagcggttggtattggtcgtcacctggtagccctcgacgctgtgcgggatcatcggcggctggttgacgtaatttagcggcatacgttcctgctctttcggcatacgaatcgccccttcctgcgtcccggatacttccggcgactggctcagatccactccgtttgccgcccaaaccgcaccacttaccaccagggcaagcgtggccatccattgacacagcgctttcatcaggtcatggcttttcattgtttcgctcccgaactccatcgcatttacacttcatccttcgagctgcctctttgttggctgcgctcgaaaatcccagtcacatcgttatctatgctcccggggatttcctcgcttaccgccgcgatgcatcccgaatgatgttgcgtatcgttattgtaaaaacatcctcagaacagacatccacgcagcgaccgcaggtcatgcagtcgcggtgagtgacctgcgccgggctttgctcatccagcaccggcgcacgtagcacatgcggttccgggcaaacatgaaaacaatccatacagcgattacatttctcacgttttttggccgtcacggtcactacgcctttactgcctagcacgccatacagcgcgcccatcgggcaaatatgaccgcaccaaccgtgctcaacgactaataaatcaaataaaaacaaagcaataatcaacaacgcgccgctactaaatcccataatcagactacgacctaacagcgacacgggattaatccattcccacagcagcgtgccggtcaacgccgaaccgattaacaccaccaccagaaggacgtaccgtatatggcgtggaatcgtcgcagactggttcaggtcaaatttcctgcgcatccagttagccaaatcggtaacggggtttagcgggcaaacccaactgcaaaataatcgctttcccgccagcgcatacagcacagcgataatcactgctcccgtcagcgccacggtagcgggaagatgtccactggcgagactttccagggtaatcagcggatcggtcaacgggagggtatcgaacagcaaactactgctgtagttgccatgcaaaacccaaaagcccagccacgggccgctgagaaacatccccagcaccataaactggctgatacggcgtaacaccagccaacggtggctacgccaccagccttttttcgcccgcgcttctcgcccggcgtcgcgtttacgatttgccatctttcccctccagccagccgaagcggtaatggtgtcctaactcccctttcgccaatgacaacggcaacacttttatcgctggttgctccagtacgcagactttttcgcatttgccgcagccggtacaggcgtcgctgtgtacggtgggcagaaagcgcgcatgtttgccggtgcgcatgttgcgatccagctccagcgtgatggcctcatcgattttcgggcattcgcggtaacaaacgtcgcagcgcagcccctgaaagttgaggcagttttcctgatccagcagcaccgccagccccatgcgcgagtcatcaatggaggcgatatctttattcagcgccccgctggggcagactttggcgcacggaatgtcttcacacatttcgcaggggatgtcgcgagcgacgaaatagggcgtgcctgccgatagcccggaggccagcgtcgccagttttagcgtgtcgtatggacacgcctgaacgcactgcccgcagcgcacacaggcgctggcgaagacattttcattcagcgcgccaggcggacgcagccgcacgcccgatgcgcgcgcggtttgctgttgcaagcccagcgccacgccaaccgccgccagcccgcccgcagtgcgcacaacatcacgcaggaagcggcggcggccattttggggtttcgctgtacgggacataacgcgttacaccttcgccagcttaacggcgcacttcttgaagtccgtctctttagagagcgggtccgtcgcatccagcgtcaggttgttcactagctgagcggcatcgaagaacggcatatacaccagtccctgcggcggacggttacgtccacgcgtttcgacaatcgaaatcacttcgccgcggcgggacgacactttaaccttatccccacgacgcagatcgcgcgctttcgcatccagcgggtgaataaagaccaccgcttccgggaaggcgcgatgcaattcaggcacgcggcgcgtcatactgccggtatgccagtgttccagcacgcgaccggtggaaagccacagatcgtactcgttgtccggcgactccgccgcgggttcaaatggcagcgcgaagatcaccgctttgccatccggtttaccgtagaatttgtacccttcccccgcttttacatacgggtcgttgccttcgctgtaacgccattgcgtctctttgccttccacgaccggccagcgcagaccgcgcgcgttgtggtaatcgtcgaacggcgccagatcgtgcccgtggccacgtccaaaccaggcgtattcttcaaacagccctttttgcagatagaagcccaggtcacgagactcatcgtttaactgatcctctttcagctcgctcagcgggaatttgctgaccgccggcgtggcgaacagaacgtcatacagcgttttgccgcgcagctccggcttctgagccaacaacgcctccggccagacctcctcggttttaaaacgacgggagaactgcaccagttgccagaggtcggatttagcttcgcccggcgctttaatttgctgacgccagaactgcgtgcggcgttcggcgttgccgtaagcgccttctttctcaacccacatggcggtcggcaggatcagatccgcagacagcgcgctcaccgtcgggtaaggatcggaaacaatgataaagttacgcggatcgcgccagcccggcatccgatcttcattgatgttcggcccggcctgcatattgttattacacattacccagtagacgttcagcttgccgtctttcaacgcgcgatcctgcgccaccgcgtgtaaacccacttttgccggaatagtgccagcggggatctgccagtgtttttcgcagatatcacggtgtttttcgttcgtcacgaccatgtctgcgggtagacggtgtgagaaggttcccacttcacgcgccgtaccgcaggcggaaggctggcctgtcagcgagaaaggaccgcagccaggctgggagatttttccggtcagcagatggaggttgtaaaccaggttattcgcccacacgccgcgggtatgctggttaaaacccatcgtccagtaagagatcacgcgcttattcggatcggcgtagagctgtgccaactgttccagttgatctttcggcacgccggtcatttcagcggtcttgtccagcgtatattctgccacgaaggctttatactcgtcgaagctcatcggctcggaagcgtcggagcccggattcttcgccgctttttccagcgggtgcgtcgggcgtaagccgtagccgatatccgtcgcccctttacgcaggttcacatgctttgtgaagaaatcctgatttaccgcgttgttctgaataatgtaattcgcgatatagttaaggatcaccagatcgctttgcggggtaaagacaataccgttgtccgccagttcaaagctgcggtgctggaaggtggagaggacggcaaccttcacgttcgggtcggacaaacggcggttagtgatgcgcgaccataaaatcgggtgcatctccgccatgttggaaccccacagcacaaacgcatcggcctgctcaatatcgtcgtagcagcccatcggttcatccatgccaaaggtgcgcataaagcccaccaccgccgaggccatgcagtgacgcgcattcgggtcgatgttgttagagcggaaaccagccttgaacagtttcgcggcggcatagccttcccagatggtccattgacccgatccaaacatgccgatcgcttctggtcctttctctttcagggaggttttaaacttctcttccatcacatcgaaggcctgttcccagctcaccggcgtaaactcgccgtctttgtgatagctgccgtctttcatgcgcagcatcggctgcgtcagacgatctttaccgtacatgattttgggcaggaagtagcctttaatgcagttcagaccacggttgaccggcgcgtcggggtcgccctggcaggcgaccacacggccctgctgcgttcccaccaacacaccgcaacccgttccgcaaaaacggcacggcgctttatcccatttgatggcttcctgctgcccgacaacggcgcgggcgacgcccggcacgctcagaccggcagccgccgcagcggccgcaacggcgttagctttcataaagctacgacgactgagtttcatggtgtttcctcaccttgctcatcctgctggtgataaaccagcgacaccgccagtacgccctcgacattgcgtactgactcaattgtttgcatcagcgtttcactctgatctgcttccgccaccacgatcagttgcccgctttcaacatcgcttaacgcgacttcgcaacccggcaacgtgttcaactgtgtgccaatggcggcgatgttctgacttttggcctgcacgaccaggctacagacctgccagttagtgcgcatggtggttctccgctttgatggctgacacggggcagatagccacacacgccccgcatccgttacaggcctgcgagtcaagctgcggctggtaaataccggataacgtgggacgaaaggtaatggccataggttcacaactgtcctggcaacgatggcattcaaccgattgcctggcgaggcagttttccgtgagcgtaaaaaccagatcccaggccctggtgtggcgcggaagaaaaagcgattcggtacaggcctgcgcacaggcataacaaaagctgcactcgccccgtttgaaatctacgctcggatatccccccgcccctcgctgcaggatgtcggcctcacacgcctggatgcaggcgtcgcaacgcagacaatgtgcgagaaaataggtcgtttctctggcccacggcggaagaatcccattgctggcgttgcgccaactgccggtcaacatgcttcgacgggataaatcaaccatgatatcgcccttccataacgacacgcttccatagggagtgaataccaataaaaaccgtacaatttatgagtagttgtttttgtaaataagatatttcaggatgtgtaagagatgcataccccgatagaggtaaatgctgttgccggatcaaaagagtgccgggtaaagacccgtaaacgtgctttttctcacatttcaatgagttatatagatatttatataacgaaaaccactaatagctgataatttcatttacattatcaatatcagaatattccactatataaaaagacgctattttattaataatcttgaaaatatgagtaaatacagattaatagataatatgaatgtgttaatctgttgtcagtgaataccgaaaacagcagaaaggaaatactgtgaacaatcaaatgaagatgtttgtccctgccgtcgtcttcgccgccctcgccagcgcctctgcctgggctaacaatggcgataccgcccagccgctggaaaaaatcgccccctatccgcaggcggaaaaaggaatgaagcggcaagtgataacccttacccctcagcaggatgaatctaccctcaaagtggaactgttgattggccaaacgctgaatgtggattgtaaccagcatcgcctcggcggcacgctggaaacaaaaacgctggaaggctggggctatgactattatgtctttgataacgtcacctctccggtatcaaccatgatggcctgccctgaaggtaagaaagagcaaaaattcgtcaccgcctggctgggtgaagacgggatgctgcgctacaacagcaagctgccgatcgtggtgtataccccggcgaatgtggacgtgaaataccgcatctggaaagcggacgctaacgtacagaacgccgtcgcgcgatgatgttacgctgcccggtcacacttaccgggcatctgaacacgccgactcacgcagcgctccggggttctttttaaaacacgtctggaaacccgctcgcccgcagcaaaaaataccccgatgcctggtggcgacgcgtggcatcttatcaggcctacccgcgtgcggacgtagggctgccatcaggcggtttatccggcgccataatccattacgcagtacgcgcaaccgcatcacgcgaagcggcgtcacgttcgtcgccggtgagttcggttaactgcccgttacgcatttcaagcagacgatcggcgtgaataaaatagtgatcatcatggctgatggcgaaaatggttttgcccatttcctgcattaacggcaacagtacctgataaaactcccggcggaaatgcgggtcctgatcggcggcccactcatccagcaaaataatatcgcgctcttccgccagcgccagcagcagtgcaatgcgctttttttgccctttcgacagtttaagattcaagatgcgcccgtcgtttagttccagcttgtgcgtcattttcaggtgctcaagccacttttcgaccagcgcgggattggcgggtttcccctgcggccccagcaggcggtcgaataaccacacatcggtgaacaccgcagaaaacagtttgcgataatcttccggctgcccggcggcaataggttgaccgtcaagtaaaatcgttcccgattgcggctggtataaaccggtcaataacatggccagcgtcgatttcccgctaccgttgccgccaattaaaaacagcagttcgccgcggtgaatcgtcaggttgatgggccccacggaaaacgcgttatcctgatagtggaaaaccacgttgcgcagctccagcgtcttccagtcgggaaaggctttcggctgtggaaaatcaggcttatacggggcgagcgcgaatttattcagtttattaaacgccacctgggcggtcagtagcgttggcaacgcccccaccgcagacagcagcggcgtgcgcaggaacagcaacgtcagtgaataggtcgccgcgacgttggtatccgcccagccgagactattcgccatccagaagaccaggcctatcgctcccagcatcatgatattcgaccagttgacggcgctcagatgaaaagtatcggcacggataatgtgatgacggtactctttggcgtccggggtatagcattgctgaaaaatctgctccgcacgctcgcggtttagcgtcagctctttgcgtccttccagcaccgtctgatagtcgttgtacagcttatcttcggtctcgcgcagggtcgccatatgctggtaaacccgcgccaccagcacaaatccgccccagatagtgaccaccatccagatagccgtaaccagcagcatttttgtcgatagcatcgccagatacgccgccgagccgacggtgaggataatgccctgcaccagctcaggcagacgcacaaaggcgatagtaatattgcgaatatcgctggtcagaccggccagtaaagaggcgctgcccagttgctcaatgcgttcaacgtgcgtatccagaatgcgcttgataaattcgctgcgcaggcggtaaacgaaatggtgtcccagagtggtgagcgccagttgggaacctaatgtgacgaccattagtaacaggagcagaccgagaaattccggcagcaccatgacggtggtgtccaccgtttcaatcaggcgctgattgataaacgcgatcaggccaatccccagcgccgcgctggcgaggctcagcgccatcacgctaataaatggccagcggtactgccgccagacaagaataagaagttccatgcatacaacccggaccgataataacagcccgcagtttaactaactccacctgcacagcaataataattcttatttttattctttttcagctgcctgacggaaggtgagattgtaacgaaattcaccggtcatgggatgaaagcccgctttaagcggctggataccatgataaaacagccgggactcgccgccccagaccacgatatcgccatgctccagtaagatccgctggatcgggtcgctgcgacgcaggccgccaaactgaaaaaccgccggcacccccaacgaaactgagacaataggcgcgcgcagatccggctcgtctttatcctgatgcagcgacagttttgcgccgggcgcgtagcgattgatcaggcaggcgtccggttggaagctcgcataccctgccgcgattgccgcctgacgacatacgctggcaaacgataacggcagcgcaggccagggtttatcagtcaacggatcgcgcacggcataacaataaccgtgacgatcggtagtccaccctaacgcgccgcagttggtcatcgccaccgacatggtgtagccgcccggcgtcaccatctgacgaaacggagactgactggcgacaaacccgatatcgtctaatagcgactgcgccgcgcgaaacgcaaagcggcgcaacaccaccgcgccaggcgccaggggctcttgccagggcgcttcatcagcaaatagatccagcattgctactcctctttttgcgcttctcgctttaatagctgcgcttttcgacgcacgccccaacgataaccggagagcgcgccatcgcgacgcacgacccgatgacacgggatcaccatcgccagtttattcgcgccgcacgcgctggcgaccgcgcgtaccgccgtgggtttgccgatagtcgcggcaagctgttgatagcttacggtttcgccgcagggaattgcgcataacgcctgccagacctgctgttgaaacgcggttccctggatatccagcggcaacgagagcagcacatcgcgtgtgttgatagccgcgacaacctgccgcacccgttgctgaaaaagcgcgtcagcaggttcgtggcgggccgacgggaaaagggtgtgtaattcagccagtagcgcgtcgtcgctatcaccggggagaatcgcgcaaatcccccgctcgctctccgccaccaggcaccgtccgtaaacccagtccgtcagcgcatagcgaacggagacattatcgccgcctttgcgaaactgttttgccgtcatgcccagcgtctggtcggcatgacggtagtagctactgctatccgggaagccagcgcggtaaatagccgccgtgatcggctctcctttcgccaaagcctcacgcagccgccgggcgcgccacgcctgctgccaccctttcggcgtcattccggtgctcgctttaaacagacggtgcagatgaaacgggctcatcgccaccgcctgcgccagaaacgccagcgttaccggcgtctcctgctcaagcaaacggcaggcgcaggcaatcttatccaaccgccgttgctgcgcgcgcgcattatccggctgacagcgcttgcaggggcgaaaaccggcgtccagcgcctgctgcgcgttggcaaaaaagcgaacatttttacgtaacgcccgcttcgagcgacaagaaggacggcaaaaaacgccggtggttcgcaccgcaaaaacgaaacgcccatccgcgctggcatcgcgcgcctgcacccgcagccagcattcatcatcgataagtaacgcttttttcatcatagactccttcattaagcatagtgcttgcttacatgcagtgtgtccgtaaatccgcccacaaaaacccgtaatcttgcgttttaattcttatcgctcaccaggaacgttttgaactgcggcgacatccaggttttaaagccttcaccttctttcatgatcataaataccgccagcccttccctccgcacgacctcttgcgccttttgcgtaccaagcaccatcaggccggtgtcccagccgtccgcttccaacgccgttggcgcgatgaccgtaaccgataccagattgtgttcaatggggcgccccgtttgcggatcgataacgtgcgagacacgcttgccatccagctcgtaatagttacggtagctgccggaggtgctgatgccatgcccgttgatatccacaatcgcctgcactgcgttttcccggtcggtcggcttctgaatcgcgacgcgccacggctgcccctgcgcattcatcccgcgactgcttaatgcgccgcccaccgagaccagataacgcgcaatgccctcctgctccatcagacgcgccagatgatccgccgcatagccctccccgaccgtggagagatcaacataaagatccggcagatctttttgcaaaaactgatgtccagccctgtcgataacctgcaaatgttgcaggcctgttttcgcttttgccgcatcgatttgtgctggtgttgggatatgcagcggctgccgatccggcccaaacccccacagattgaccagcgggcccacggtgatatccatcgcgccatccgtcttcgcgccaatacgcagcgccgaggtcacgatatccgccatggcttcgctgaccggccagggcgcaagactgcgtgaatggttaaaacgcatcaacgcggagtcatttttataggtagaaagcaaccaatcatcagcatcaagctgagtctggattttagtctgtaactctgcggcgcgtttcgcatcgataccaaccacgctcacccgccagagagtccccatcgttttaccttccagcacctgagcggcaggtgacgctgttgtcgtttcgggagcctcatcgcagcccataagtagaaaagccgccgccagacacacggcccggcaaaaagtcattttcatcgctgtttatcctcattcgaatggacgcaagcgtatatcaaaacgtcgtatttgtacgccggaataaggcatgaaaaaagggcccgcaggccctttagcaacatcttttgctgattagaactggtaaaccagacccagcgctacgatgtcgtcggtgttgatgcccgcatcgcgggtaaagtcgtttttatccagcaggttgattttgtaatcaacataggtggacatgtttttgttgaagtagtaagtcgcgccgacatcaacgtattttacgatgtcctggtcgccatagctggcgccgtaaccgttgctgatgtccttacctttagactgcaggtaagccacagacggacgcagaccaaagtcgaactggtactgagcaaccacttcaaagttctgcgctttgttggcaaaaccgtaagaggtggacgggttgctaccgttagaggtaccaaaacgggttgcgttataggtctgagaatactgcgctgccagatagatgttgttcgcatcgtatttcaggccgccggtgtaaaccgtggcgcgatcgccgttaccatacaggcgagcgttagcggtgttgttctgatcggcagtacgtttagacgtggtgatagcgccaccgacagagaagccttcgccgattgcataagtcagcgatccgccgtaaccgtcgccgttctggttcagcaggctgcgaccgttggtgttttcaccgctcacgctgccgtttttgccctgatactgtaacgcgaagtccagaccatccaccaggccgaagaagtcggtgttacggtaggtagcatagccgttaccacgctgctgcataaagttgtcagcgccgtaggtgtcgccgccgaactccggcagaacgtcggtccaggaggtcacgtcataggttacgccgtagttacgaccataatcgaaggaacctgcatcagcgaatttcagacccgcaaacgccacacgcgtccaggagtcgttgctgccttcagtctggttgccctgaatctgatattcccactggccataaccggtcagctgatcgttaacctgcgtttcgcctttgaagccgatacgcatgtaggtctggtcgccatcgctgcctttgtcgtcagagaagtagtgcaggccatcaactttaccaaacaggtctaatttgttgccgtctttattataaatttcagccgcattcgctgcgcccgccaccagcagagctggtaccaggagggacagtactttaactttcatgttattaaccctctgttatatgcctttattgcttttttatgccactgcttactggttaaccctcattaaccagtcggcaagtccattctccgcaaaaatacagaataatccaacacgaatatgatactaaaacttttaagatgttacagttatctacatagatgtttcaaaatatgaattttacggaacttttttaaagcaaaaatcaagtaaaaataagcacaaatagacaaaatatattcacgaaacttttaaaatcaacgggttaaattgatgaaattcatagcactgaatgataaaacagaatcttcattcgcaactaaaatagtgaccgctatcatcattaactttatttattaccgtcattcacttctgaatgtctgtttacccctatttcaaccggatgcttcgcattcggttttttttaccctttttcagacacacccggctgatttatgctacctgcctaaaactatcacggttattcactacactcccctgctcgaccgttcgtaagacattagcaaataatttcttgatatttagtgctaaacatttataagtagtctttatatttgtaccgttctgcgaaggttgtacgcttttcccgtcccgccgacggagcgcgtgttaagttgcccggcatgacgtaagagtctggaaattcattcattaccctttatactgcccttcaccttcagcgttgcttttacaggtcgtaaacataaatgagtcagtctgacacaacggtctctacccgattctcccttctaccgggaagcattacccgtttcttcttattgctgatcattgtgctgctggtaacgatgggcgttatggtacagagcgccgtcaacgcctggttgaaagacaaaagctatcaaattgtcgatatcacccacgctattcataaacgcgtggatacctggcggtatgttacctggcaaatttatgacaacatcgccgcgaccactacgccatcgacaggtgaaggacttcaggaaacgcgtctgaagcaggatgtgtattatcttgaaaagccgcgacgtaaaactgaagcgctgattttcggttcccatgacagcgccacgctggaaatgacgcagcgtatgtcaacttatctggatacgctgtggggcgcggaaaacgtgccgtggtccatgtattacctcaacggacaggataacagcctgattcttatctctaccctaccgttgaaagatctctcttccggctttaaagagtccactattggcaatatcgtcgattcccgccgggcagagatgttgcagcaggcgaatgcgctggatgagcgcgaaagtttctcctcattgcgaaaactggcctggcaaaacggtcactattttacgctgcgcacgaccttcaatcagccaggacatctggcaaccgtggtggcgtttgatctgcccattaatgatttaatcccgccgggaatgccgctggacagttttcggatagagcctgacgcaacccaagcgacggggcgaagcagtgaaaaggaagcgcctgatagcgtcacgattagctttaacggttcaaaaattgagatctcctcagcgcttaactctaccggaatgcgcctgatctggcaggtaccgttcggtacgcttttgcttgatacgttgcaaaatattttgctgcctttactgctgaacatcgggctgctggcgttggcgttatttggctacgccacgttccgtcatcagccgggacggtcgacggaatcgacatccggcaacgcggcgaataatgagcttcgcgtcttacgcgccattaatgaagagatagtttctctgctgccgctgggtctgctggtctacgatcaggaaggcaaccgcaccgtgatcagcaataaaatcgccgatcatctgttgccgcatcttaacctgcaaaatattaccagcatggcggaacagcatcagggcgtgattcaggcgacaattaataacgaactgtatgagatccgtctgtttcgcagccagatcgctccccgcacgcagatctttattattcgcgatcaggaccgggaagtgctggtgaataagaagcttaaacaggcgcagcgtttgtatgagaagaatcagcagggccgcgccgcctttatgcaaaatatcagcaacacgcttaaagagcccgtacgccaactggcggttaacgccgcagcagtcaccacgccggaaagcctgaaactggcggatcaggcggatgtattggtacgtatgatcgatgaaatccaactggcgaatatgctggaaaatgacgcatggaagagcgaagccacgctgttctccctgcaggatcttattgacgaagtcgtgccggaagtgctgcccgccattaagcgtaaagggctgcaactgctgattaataaccatcttagcggcaacgatgaacgctggggcgatcgtgacgccctgcgccggattttgctgctgttgattcagtatgccgtcacaacgaccgctatgggtaaaattacgcttgaagtcgagcaggatgaatctatcgcggagcgtctgactttccgtattctggatacgggcgaaggtgtaacgttaaacgagattgataatctgcatttcccgtatatgaatgaaacgcagggcgatcgttacggcaaagcgaatccgctcaccttctggctgtgcaatcaactggcgcgcaaactgggcggtcatctcaacattaaagcgcgagaaacgctgggcacgcgctataccgttcatgtcaaaatgcttcctcacgatcagcatactcaggtcgaagagcgcctgctggacgacgtgagcgtgatggtcgatgtgacgtccaacgaggttcgcgcgattgtgctgcgtcagttagaaaactggggcgccacctgcatcacgccggatgaaaggcagataagtcaagaatatgatctctttttaacggataatccgtctaatcttactgcctcgggcttgcttttaagcgatgatgagtcaggcgtgcggaaaattggcccgggtcagttgcgcgtcaactttaatatgagcaatgctatgcaggaagctgtactacaacttatcgaagagcagctggcgcaggaagagattcccgcctccccgctcggcggagatgaaaatgccgagcttcatgccagcggctattatgcgctatttgtagacacagtaccggatgatgttaagaggttgtatactgaggcggcaaccagcgatttcgctgcgctggcccaaacggcccaccgcctgaaaggggtgtttgccatgcttaatctggtacccggcaagcagttatgtgaaacgctggaacatctgattcgtgagaaagatgctccaggtatagaaaaatatatcagcgacattgacgcctacgtcaaaagcttgctgtagcaaggtagcccaatacatgaacaatatgaacgtaattattgccgatgaccacccgattgtactgttcggtattcgcaaatcacttgaacaaatcgagtgggtgaatgttgtcggcgaatttgaagattccacagcattgatcaacaacctgccgaaattagatgcgcatgtgttgatcactgacctctccatgccgggagataaatacggcgatgggatcaccttgatcaagtacatcaagcgtcattttccgagcctgtctattatcgttctgaccatgaacaacaacccggcgatcctgagcgccgtgttggatcttgatattgaagggatcgtactcaaacagggtgcgccaaccgatctgcctaaggcgctggccgcgctgcaaaaaggcaaaaaattcaccccagaaagcgtttctcgtctgctggagaaaatcagcgcaggcggttacggcgataagcgtctgtcgccaaaagagagcgaagtattacgcctgttcgccgagggtttcctggtcaccgaaatcgccaagaagctcaaccgcagcattaagaccatcagcagccagaagaaatcggcgatgatgaaactgggcgtagagaatgatatcgcgctgctcaactatctctcttccgtcaccctgagtccgacagacaaagaataaatcgcttttatgttacccagcctgatggcgctacgcttatcaggcctaccagtcgactcatcttttacaggccggacaggcgacgccgccatccggcattttttatgcccgcgttttacgtacccgctcggcatacaccgccagcgtctgtttcaacacatccagcgtcacaggcttcgacaaacagctgtccataccggactccaggcaacgttgtttctcttccgccagcgcgttcgccgtcacgccgacgacaggcagcgtcagcccaagctgacggatacgctgcgtcaggcgatagccgtccatgttcggcatgttcacatcgctcagaacaatatcgatagcatttttactcagcacattcagagcgtctacgccatcattggctgtcttacactgataccccagcgatcccaattgatcggccagcaagcggcgattgatcggatgatcgtcaacgaccagaatcatcatgtcgtcatttgaatctgcagttttatccgtcgtcggcaatgcgctggaaagcgcttcactatccagctcaatactatagatacgcgccaacagcgcgggcaactcatgcaccgacgccacactatgcacccactcgcccggcgctctttccaacggaatcccgatatgacggcggcaaaagacgaccgccgccctcccctgccaggtatgctccagcgcgtcatcgacaatcaaaatatcgtccgcggcgggttcttgcccttcataacgctgcgtatgaacgccgctacgcgccagactggtctcaataaactggcacaaagaagtattgcgcaccgccagccaacagcaggttccggcgagtccttccacgctctttttcacagggtattgcgcgccataaagcgggatgcgcagcgtaaactggcttcccatgccaggctccgaatcgacggaaatatcgccgtccatcatgctgatcaatttttcgcaaatcgccagccccagaccggtcccctgaaagttacgctgtacgccggttcccacctggaagaagggatcgaacaggcgaaccacctcttttgccggaataccgacgccggtatcccgcacgcgaatgctgagataatccccatcacagcgcacatgcagcacgatgcagccaatatcggtaaacttaatggcgttgctcaacaggtttgaaataacctgctgtaaacgcatcgggtcgccgttcagcgataccggcacgtcaggctcaataaaacaatacagaccgagctgcttacgcaccaccaacggcagataattggcggtgatatggttcatcacctctcgcggtgaaaattcgcgcggctcaatctttagctgttccgactcaattttcgagaagtcgagaatgtcgctgataattttcagcaacagactggaggagttattcatcgccgtgaccagacgttccacgccttttggcagctctttggtttgcagcagatcgagattgccgatgataccgtacagcggtgtgcgcaattcatggctgaccgtcgcaaggaacatggatttagactggcttgcctgctccgccgcctgcgccatctcttgcagcgactcttccattttgacgcgcgtactcacatctaccaacacgcaaatcgcgacgttttcattgcgatagcgggaatggacgaagctaatttgcaaattggtattattgctggtcaatacatcaacaaagttgacctgctggccgcaaataatttgcgtcaggcgctgtctgtcttcatgcgtgagcatgttcaggtaggtgtgcgccagttcgttactcagaatattgacaccatcaatagtgcgcagaatacagatccccaccggcgcggaggcgacgattttacggttgaactgttcatgctcttccagacgctgagcatcgctctccgccggaataaaaattcgccgctcatacatccgcgcaagcgtaaacagccctgcgcccaccagcacgttcagcaggatagcgttcaggataagaatacgaatacgctccaggactaaatctacaggcacagaatagacaatactgagcgaggatggcggcaggctttttttgagtaccagttcgcgaaaacctggcgtataaccaaaccaggaacgctcctgcatccagcgcggctccgctttaataatgccgtcaggaccggtcaacgaaatcagcgaatggccgttctcatcaataatagtgacgcccatcggcaaactgccgggcgtgaaaaaattttccatacggatggactgctcgacgcccagcagcgcctgcagacggttggccagatacaccggcgtcagcgcataaaagtagcccacgccctgacgcgcgccctggcttatccagaaaaggttattcccactttcttcctgcggcgcgttgcggtatttcataatccgctcatgtaacgcttttaacgcatcatcgcgctccacgggcatttcacgcaggccgaaattcgccatacagaggttatcgctgccaatcaggaaaacgcggttaagatcatacgccgctgaaaagttgtcgcgccagtaacgcataaaccaggccagcgactccagcgatccgcgccaggcggagcccatcgccgcacagtctgagtcggcaaatagcggttcaaagtccggcaccaccattttgtcatcacgcgcacgcgacgacatgacgccgttttccgccgttaaacggttctcggcgatatatttgagctctttcatcacatccgacgtgcgctggataaaacgctgcgcctgatcggagctaaggttgaactcctgacgaatttcagactcccgctggtgcagggcattgacgatgtaaaacaccgaaacaaaggcgattaagagccaaatgagtaacgctaacgctctgaataagtagcgcgagactttcagcgtagttcgaaaggaagcaaggtatttcaaaggggcgaagctccgcctcaggatgtaaatagagtgtgactaaggtagcggtaaatgacgtagcccgcaacggcaaagaaaaagggccggatatccggccctcgcacagcaataacattactcgtcagcgtcatccgcaacgtcgtcatcgctttccgcttccggggcgatatcctcatccccttccgccacgctgccgtcgatagcgtcgagttcttcgtcatctaccggttcagcaacgcgttgcagacccaccacgttttcatcttccgccgtgcggataaggataacgccctgggtattacgtcccactacgctgatctcggacacacgggtacgcaccagagtaccggcatccgtgatcatcatgatctggtcgcaatcgtctacctgtaccgcaccgacaacggaaccgttgcgctcggtcactttgatagagataacgccctgcgtcgcacgagacttggtcgggtactcgtccgctgcggtacgcttcccgtagccgttttgcgttacggtcagaatagcgccttcgccgcgtgggatgatcagagagacgactttatcgtctcccgccagcttaataccgcgcacaccggtcgcggtacgccccatcgcacggacggcgtcttctttgaagcgcaccactttacccgcggccgagaacagcatgacttcgtcagaaccagaagtcaggtcaacgccaatcagctcgtcgccgtcgttgaggttcaccgcgataataccggcggaacgcggacggctgaattcggtcagcgccgttttcttcacggtaccgctggcggtcgccataaagacgttgacgccttcttcatactcacgaaccggcagaatcgcggtgatacgttcgttggcttccagcggcagcaggttgacgatcggacgaccgcgcgcgccgcggctggcttccggcagctgatagaccttcatccagtacagacggccccggctggagaagcagaggatggtgtcatgggtgttagccaccagcaggcggtcgataaagtcttcttctttaatacgcgcggcagatttacctttcccaccacgacgttgcgcttcgtaatctgtcagcggttgatatttgacgtaaccctggtgagacagcgtcacgacaacatcttcctggctaatcagatcttcgatattaatatcggcgctgttggcggtgatttcggtacgacgctcatcgccgaactgatcgcgaattaactccatctcttcgcggatcacttccatcaggcgatcggcgctgcccagaatgtgcagcaattcagcaatctgctccagcagctctttgtattcgtcgagcagtttttcatgctccaggccggtcagtttctgcaaacgcagatccagaatcgcctgcgcctgctgttcagtcaggtagtactgaccgtcacgcacgccaaattctggctccagccattccggacgcgcggcgtcatcaccagcgcgctccagcatcgcagcaacgttgcccagatcccacggacgcgaaatcagcgccgcttttgcttccgccggcgttggcgcgcggcgaatcagttcgataatcgggtcgatgttggccagcgcaatcgccagagcttcaaggatatgcgcacggtcacgggctttacgcagttcaaaaatagtccgacgcgtcaccacttcacggcggtggcgcacgaacgctgaaatgatatctttcaggttcatgatcttcggctggccgtgatgcagcgccaccatgttaataccgaaggaaacctgtagctgggtctgggagtagagattattaagcaccacctcgcccaccgcatcgcgtttcacttcaatcacgatgcgcatcccgtctttgtcggattcgtcacgcagcgcgctgatgccttccacgcgtttatctttcaccagctcggcgattttctcgatcaggcgcgctttgttcacctgatagggaatttcatggacgatgatggtttcacggcccgttttggcgtcagcttcaacttccgcgcgggcgcgaatgtacactttgccacgaccggtgcggtaggcttcttcgataccacgacgaccgttgatgatcgcggcggtcgggaagtccggccccggaatatgttccatcagcccttcaatgctgatgtcttcgttgtcgatatacgccaggcagccgttaatcacttccgtcaggttgtgcggcgggatattcgtcgccatacctactgcgataccggaagaaccgttcaccagcagattcggaattttggtcggcatgacgtccggaattttttccgtaccgtcatagttatccacgaaatccaccgtctctttttcgagatcggccatcagttcgtgggcgattttcgccagacggatctccgtataacgcattgccgccgcggagtcgccgtcaatagaaccgaagttaccctgaccatccaccagcatgtaacgcagcgagaatggctgcgccatacgaacgatggtgtcatacactgcggaatcgccgtggggatggtatttaccgattacgtcaccaacgacacgggcagattttttataggctttgttccagtcattgcccaatacgttcatggcgtaaagtacgcgacggtgtaccggcttcaggccatctcggacatccggcagcgcacggccaacaatgaccgacatcgcataatccagataggagctcttcagctcctcctcaatgttgaccggtgtaatttctctcgcaaggtcgctcatctaaccgctatccctctactgtatcccggattcaaaggtcgcaaattataacacattcgcccacgtactggtaaacggaatgcagccagacaatgctttattcgggtgccgcatgctctcttcatttataagcgtggtctcggcgtttattggcgatcggcttcagaggcgacacaggggagatcggggcctggccaggaagaggttagaaaatcaatacctcccgtgtatacccgtcatacttcaagtttcatgtgcgttggctgcgagttactcggcccatccctgggcctcgccccgtcgcggttagcgcaagcgctgttcaagacggttaaccattttatcctgcaactcgaattatttaggggatatgccgggaggcataaaccataatcagtatcaccagatgctatttaatcacataggccagatattctttcactacctcatcgtttaattcctgacccaatccgggctgttccggcgcgacataatagccattttccggttgataatcgtgggtacaaagttcccgaatagatgctttcatcgcattggtatgatgctcatgaataataaagttgggaattgctgtttccatatgcagcgcggctaccgtggaaacaggaccgccgcaaacatgcacctgtacagtggtgtcataaatattagcatagtcacagattttctttccttcggtaattccgccgcagagacacaaatcaggttgcgctacggcaatagactgcttctccagtaattccctgtatccccatcttgtgtaggaacgctcgccagtggcgattggaatcgttgttgaacgggaaactttctgcatattatcagaatttaatggatgaatcggttcttcataaagaaagatacgatacttttctatcgccttcgcaaattgaatagctgagtttgtaccgagaagagaatggatttccacgataatatcagcatcatcccccattgcttcacgcatagcggcaattcgcgcttcccccatttttaattgatcggccagtaacaatcctgaatagttacgatttctattctgaaaaacacagtcatcgccattacgatcgatttcgagtggatccactttaatcgcatcatatccatcgtcaagagccgcacgcgccgcctcagcatattcctcaggtgtcactaatatatggcgtttatccccccaaccaaattgtaactgactagcataggttcttaatttttcattagttttcccgccaaggagctgataaacaggtacacctaaatatttacctttgatatcccaaagagcaatatcaatagcgctcattccggcataaaaaacgttcccgccccccatcccccaaaaagtctttctgaaaaagaactcccaaattttttcgatatttagtggatcttcacccacaatcaatggcgccagatctctgatgatccctacgccagctttagcgcctgcgccataggccagtcctacttcgccaataccacttaatcctgagtcggtattcacccggataagtactggattataggaggacatcgtttgatctcttttttttaattcacagtcaaaaacttcaatagacgtaattttcataatttctccatttatcaggttcgtgatacaacatttgtttgttggcttttttcttttttcacatcaattttcattaacgccaaaacggctaccgcagcgaagcaaagtattgcctctacaataaatattcctgtcgcaccataatgagtagaaacgaatcccagtgatttattaatcaggaatccgccaagacttgaacatgagttaataaacgcaatgctgatagccaaccctgacggcgacaataatgcagaaggcagcgcccagtaaggtccgtaatagctgaggatcccaacaccatagaacgttagccccagcattctcagcgacattgaggggacaagagcaatcatcagaaaaccacagcctgccagaaacatgggtaatgcagcatgccattttcgttcattctttttatcggaatgccagccccaccagggcatgctgaacatagcgaaaataaacggaatactcatgattaaaccaacgtcagtatccgtaaaatcagctgaaaatcccttcaccaaccccggcaaccagtagtttgccgccagagcagccgcctgaatcaacatgtaggcgaaagaaagctgaagcaaaactggatttttgattacggaaagaaaggatgagttggtatttttatttaatgcagctgcggtttcattgtcagtacgtaatttattaactaaggccgatatctgctgtggcgtaagccatttagccttttctggactgtcaggcagtaaataaaatgtcaggatgccaaggaatacggtagggataccttcaatagcaaaaagccagcgccagccttcataatccggggtattcaaatgctcgatgatccaaccagacatcggtgcagccaataccgatgcaacagcaatagataacatgaagaaactattgacttttccgcgttcacgagccgggaaccagcatgcaagataataaaccatgcccgggaaaaagccagcttcaaatacccccaaaaaaatgcgagccagcaaaatatgttgagtatctttagcaaaaaaaatcagcccagttaccgctccccagccgataataatggaactaatccattttcttgcgccaagcttttgcaagccaatgctactcggaatttgaaagattaaatatgatatgaagaatatagaagaaatattagcgaaatcctcaggcgtaataccgagagattcattcatgcgtaatgcagcaaacccaatattgacacgatccatatagttaaaaaagtaaagaataaaggccaaaggaatgattttcctttttacaatacgaattgcatcgtataaattttcttgtggactactcattttgcatcaccttttatgattcaatgaataagggtattgaccggaatcgatgttacgtaaaaaacaatacaattcaaaagctaatgtgtcatatctgatatatcagcaagcaaacttaatgaaatatacaataacaacaataaagtatgtaaattttcttatatctgatatattagatccgttaattttgaataaattaattacaatggagccgggtttaaccatggaggagaagaaaatgaaaaatagattaaagcgtgactttagtcacatatcaattgaaatacccaaatccatcacccaggtgattaaagagaaaataagggagatgattatccatggcgatttcgatcttgggcaagcgatcagtgaaaatgaactatcaaatattctgatggtaagtaaaacaccaattcgtgaagcttttatttggctgagctataatgaaaacttagtcaacatcattccccgcagtgggacatttgttttttctgtcaccgacgaggatatcaatgatctcatcaaaatgagggttatccttgaacagggcgcaattcgtgaagcgatggagaaaaatgctaacaatgtcatagtcgaattaagcaatattttatcgaagtcagcaaaaattaatgcagagcgagatacgcaagcttacctcaaactggatcatgattttcattatgtttttgtgaaatatgccgataataaatacatttcacaagcacacctgttgatctcagcacgtttattggcaattcgctacagactggattttaccgctgaatatatcaccagctctaaccgtggacatgccactattttggatatgttaaaaaacaacaacgtcgagggcgtctgtaattttatcacgcaccacatcggtagcggttttacagaacgcgcaagaaaacttcttgcgctgaaagcgtaataaagacggcagtagatataacgcagcgactttgcacctgctatactgccccgatagatcaatagcggaatctcatgtactcatgaacactgaaaaaccgtcggtagctcacaacgttgaccataatgaaatcgccaaattcgaagccgtcgcgtcgcgctggtgggatctggagggcgaattcaagccattgcatcgtatcaaccccctacgccttggctacattactgagcgctcaggcggcctgtttggtaaaaaggtgctcgacgtcggctgcggcggcggtattctggcggagagcatggcgcgcgaaggcgcaaccgtcaccgggctggatatgggctttgagcctttgcaggtcgccaaactgcatgcgctggaaagcggcatcgaggtagagtacgtgcaggagacggttgaggaacatgcggcaaaacacgcccagcaatacgacgtcgtcacctgtatggaaatgctggagcacgttcccgatccgcaatcggtcgtccacgcctgcgcccaactggttaaacccggcggcgaggtgttcttctcaacgttgaaccgcaatgggaaatcctggctgatggcggtcgtcggcgctgagtatattctgcgcatggtgccaaaaggcacgcacgacgtgaagaaattcattaagcctgctgaactgttaagctgggtagatgaaaccgtcctgaaagagcaacatatcaccgggctgcactacaacccgataaccaatactttcaaactcggtcccggagtagacgttaactacatgttgcatacccgcgctaaaaaagcctgacatcaaagaattttcctataagggttgcgttagatcatcgggcgcaacctttctcttcgatgaagaaatcagcattcgatcaaattttgatttttttttatgaattgttgacatcctctccaggccttatcagacgcgcatttagcgattcttacgcttttgcaaccgcaatttaacgccaaaatcaactcttgtactcaaaagaatccctactagaatactcaccatatagcgtttcacttatcgattaccccctatatatagtatttatccacagagttagtcacaacgtggcgttgtggataagcggggggatatttttctttcacggacaggtaaacaggtagaaaaccacatgaatcagagtctgctggtgacaaagcgtgacggccgtactgagcgcatcaatctcgacaaaattcatcgcgtgcttgattgggcggcagaaggactgaataacgtatcggtttctcaggtcgagctacgctcgcatattcagttttatgatgggattaagacctccgatatccatgaaactattattaaggctgccgcagacctgatctctcgcgatgcgccggattatcaatacctggctgcgcgtctggcgattttccacctgcgtaagaaagccttcggccagtttgagccgcccgcactttaccaccatgtggtaaaaatggttgagcttggcaaatacgacaatcatctgctggaagactacacggaagaagagttcaagcagatggattcgtttatcgttcacgatcgcgatatgaccttctcctacgctgccgttaagcagctggaagggaaatatctggtgcaaaaccgcgtgaccggcgaaatctatgaaagcgcacagttcctctacattctggtagcggcctgcctgttctcgaactacccgcgtgaaacgcgtcttgactatgtaaaacgtttttacgatgcggtctctacgttcaaaatttcgctgccgacgcccatcatgtccggtgtgcgtaccccaacccgtcagttcagctcctgcgtactgatcgagtgtggcgacagtctggattccatcaacgccacctccagcgcgattgtgaaatacgtttctcagcgcgccggtatcggtatcaacgctggccgcattcgtgcgctgggcagcccgattcgtggcggcgaagccttccacaccggctgcatcccgttctacaagcacttccagacggcggtgaaatcctgttcgcagggcggcgtgcgcggcggcgcggcaaccctcttctacccgatgtggcatctggaagtggaaagcctgctggtgctgaaaaacaaccgcggcgtggaaggcaaccgcgtacgtcacatggactacggcgtacagatcaacaaactgatgtatacccgcctgctgaagggcggcgacattacgctgttcagtccgtcggatgtacccgggctatacgatgcgttcttcgccgaccaggacgaattcgaacgcctgtacgtgaaatatgaacacgacgacagcatccgcaaacagcgtgtgaaagcggtcgaactgttctcgctgatgatgcaggaacgcgcctctaccggtcgtatctatatccagaacgttgaccactgcaatactcacagtccgttcgatccggttgtcgccccggtacgccagtctaacctgtgtctggagattgccctgccgaccaaaccgctgaacgatgtcaacgatgaaaacggcgaaattgcgttgtgtacgctgtctgcattcaacttgggtgccattaaaactctggacgagctggaagaactggctattctggcagtacgcgctttggatgctctgctcgattatcaggattacccgattccggctgccaaacgcggcgcaatgggccgtcgtacgctgggcattggcgtgattaacttcgcctactggctggcgaaaaacggtaagcgttattccgacggcagcgccaataatctgacgcataaaaccttcgaagccattcagtactatctgcttaaagcgtccaacgaactggcgaaagagcaaggcgcctgcccatggttcaacgaaaccacctatgcaaaaggcattttgccgatcgacacctacaaaaaagatctggatgcgattgtcaacgaaccgctgcactacgactgggaacagctgcgtgagtcgatcaaaacccacggtctgcgtaactccacgctatcggcgctaatgccgtcggaaacgtcgtcccagatctccaacgccaccaacggcattgagccgccgcgcggctacgtcagcatcaaggcctcgaaagacggtattttgcgtcaggtcgtgccggattatgagcatctgaaagacgcttacgaactgttgtgggagatgccgaacaacgacggttatctgcaactggtgggtatcatgcagaagtttatcgatcagtcgatttccgccaataccaactacgatccgtcacgtttcccgtcaggaaaagtgccgatgcagcaactgctgaaagatttgctcaccgcgtataagtttggcgtgaaaactctgtactatcaaaatacccgcgacggcgcggaagatgcgcaggacgatttggcgccttctattcaggacgatggctgcgaaagcggcgcttgtaagatctgatgaatagtgccgggtagcgctatgcttacccggcctacgattgtacggtttgtaggccggataaggcgcttgcgccgccatccggcgctcatcccataaaggattcacttcaatggcatacaccactttttcacagacgaaaaacgatcagctcaaggaacccatgttctttggccagccggtcaacgttgcacgctatgaccagcagaaatatgacatcttcgaaaaactgatcgaaaaacagctctctttcttctggcgtccggaagaggtcgacgtctcccgcgatcgtatcgattatcaggcgttgccggagcacgaaaaacatatcttcatcagcaacctcaaataccagacgctgctggattccattcagggacgtagcccgaacgtcgccctgctgccgctcatttccatcccggagctggagacgtgggtagagacctgggcgttttctgagacgattcactcacgatcctacacccacattattcgtaacatcgtcaacgatccggctgtcgtttttgacgatatcgtgaccaatgagcaaattcagaagcgcgccgaaggtatctccgcctactacgacgaacttattgagatgaccagttactggcacctgctcggtgaaggcacccataccgttaatggcaaaacggttgtcgtgaatctgcgtgagctgaagaaaaaactgtatctgtgcctgatgagcgtgaacgcgctggaagccatccgcttctacgtcagcttcgcctgctctttcgcatttgccgagcgtgaactgatggaaggcaacgccaaaattatccgtctgatcgcccgtgacgaagctctgcatctgaccggcacgcaacatatgctgaacctgttgcgtagcggcgtggacgacccggagatggcggaaatcgccgaagagtgtaaacaggaatgttatgacctgttcgtgcaggcggcgcagcaggaaaaagagtgggcagactatctgttccgcgacggttcgatgatcggcctgaataaagatatcctgtgtcaatacgttgaatatattactaatattcgtatgcaggcggtggggctggatctaccgttccagacccgctccaacccaatcccgtggatcaatacctggctggtgtccgataacgttcaggtcgctccacaggaagtagaagttagctcttatctggtcggacaaatcgattcggaagtcgataccgacgatctgagtaatttccagctctgatgggacgcgtcacgctgcgtatcactggcacacagctgctgtgccaggatgaacacccttctctgctggccgcgctggaatcgcataacgttgaggtggagtatcagtgccgcgaaggttattgcggctcctgtcgtacccggctggttgccggtcaggttgactggattacggaacctttagcgtttatccagccgggagagattttgccctgctgctgcagggcaaaaggcgatatcgaaatcgagatgtaactcagtgcaactcgctggtggaaaccaacggcatcacgccacgttttttcatctgcacggcatacagtgcgccagcgagtaccaccaacaccgcgccagcgacataaatcatacgatagccaactgactcaaccatcattcccatgataaaggcgccaatcgccattccggcgtccatcgcgttaaagaacagtgaattcgccacaccgattttatgcggttcaaccgagctgataatttgcgtctggaagaccggcgtgaccgaaccgtagccgataccgatgagaccaccggaaataatcatcatgatgctgccattggtgtagcccagcgccaccagaccgatggtaaaagccaacagacatggataaacaacatatttcggcccttttttatcacaaatattcccggtgaaggtacggcatatcatcagtaaaatcgcgtagcacagcaggaaattactggccgccgccattaaatccagctcacgcgcatacagcgccaggaaagccgacacgccggcataggagaaagtcataaaaaaggtgaccagcgcaaaaggcaaggcggcgcggtcaaacatcgcggaaaaacccagattcggtttcgaaccatcggcatgacgaattaccggaggaaccgtcacaatcagggaaagcacaatccctaacgccgctacagcggaacaaagccagaatgcggcagtgaacgcgtcccagcgggccatattcaaaccgatccacggtcctacgaccatcgccaggcccatcgctaaagagaaaaagctgatgccctctccacgtcgggaggccggaattaaccgcgctgaaatagttccttttaccgtggtaataacaccaaacgtaatcccatgaagtacgcggataaagagcagcgactcgatagaatggcaaaccggatacagcgcggtaatcaccaaaaaagccagagaagagagcaccagaatctttttattcgaatattttcccacccattgtccggcaaatggccgaataacaattgccgcggccaggaaacatgtcactaacagcccggccttatctgcagaagcatgcaggcggtcagcgatataaatgggtaataaagttagcagtacataaaaaacaaaaaagataataaaactgactatggtgattgcccaaaaatctttcgtccataatttttctttcattcttaacgacccgctcagatggcgcacgcaggcaacgctcagctcaactgaacacctatcaggtgcgtcaaaatgtgatgtattcgatagaatcacagtataaacaagtgcactctattagaaaaattaatcgttttaattatattgattaggttttactaatgacactaacccaaatccacgccctgcttgccgtactggagtacggcggatttaccgaggccagcaaacggctatacatgacgcaatccgccgtcagccaggccatctccgcgcttgaggaggagctcggcgttgacatattgattcgtgagcgtcgtaaagagatcgagcttaccgccgccggtagccgcatcgtcaggcacttacgcgcgatccagcgcgacgtcaacgcggtaaaagagattgccgaacaagaaaaaaagaacccggcccgtacgctacggattggctgttttcccagcgcctgcgcctgcattttacccggcgtcattcgctattttgaaagccatcatccaaatgtaaaaattatcccttatgaagagaacagtacggctattattgattcgctgcaggacggaagtattgatgccggtttcgttccttttccggtcaacggtatgtattgcgtccccatttaccgggataaattcaccgtagtggtgcctgaaaatcatcccctggcggccaatagtacggtaacggtcgaagaactgatggacgaaccacttattgtcagtaaaggtcgttatgaattaagcattatggcgttgtttaaagaaaagggtattgagccgatatttaaatatgaatttaaccatcccgatactgcgctgaattttattcgccagggattaggtatcgccttattgccagaattaaccttaaaagccacgacaggaaaattatgctccgtggcgctggaacccaccttttatcgacaaatttccctgttagcaaaagaaccgccggtagaaggaagtccgctatttttattacaaaaatgtatggaaacactgaccgatgaggggttgctataaaacaaccccgcctgatggcattgcgtttaccagacttacgctggcaaacgttgcgccaggccggatgaggcgtttatgccctcatccggcgcgtcacttcgactatggcaaacctttagtcatttttttgcaggaacatgaccgccttatccgggaagtcagtgaacagcccgtcgacgcccgccttgttatacaggatgtcgtacaactgattgacgtctgtggcatagtccggcaattgatcggcacgcacagtgtaaggatgcactaccatcttattctgatgcgcgtcttgcaccattccagtcagcttgatattccctttcgttgagccttccgcaaccagcatatggtaatccggaccaataccgtccgcatattccgccacctgcttcatagcgcccggcttaaacatccagtcgtagttgtaatttacccaacgaccgtccggctgtttctgctgtgtttcattccagtcggtatacgcaataagttgaaccagattgagatccatccccattttgggttccagttcattcttaatacgtttcagctcagcgacatcaaaacactgcaaatagacattgtcctgcttgccggtgtaaccatacttcttcagcacttccagcgttttcgcggcaatatctttcccttcctgatgatggaaccacggcgctttaatttccggataaataccgatatttttaccggtagagtgatttaatccctgaacgaattcaatttcctcttcaaaggtatgaatgcggaaatcagattttcccatcgggaaacggcccggataagtttgtacttttttgccgttttcaatatcaaacccttcggtaaacttcagggatttaatttcatccagcgtaaaatcgatagcgtaatagcgcccatctttacgcgcccggtccggaaaacggtcagcgacgtcagtcacccggtcaaggtagtggtcatggaggacgaccagatggtcgtcctttgtcatcactaaatcctgttccagataatctgccccttgcgcatacgccatcgctttcgccggtagcgtatgctccggcagataaccgctggcaccacggtgggcgataacgactttttcagccgccacggcgccgcttccgatggtcattcctgccaacattaacgccacgctaaggtttttcagtgtggttttcatgttattagcctccgttgcgttttaactgcagctcatcatgatggcgtttttcaccaatcatcacgaccaccagcaggattaccgccagaatgctgccgccaatcatcaccataaagccgccatcccaaccgaagaagtcaacggtataacccacaatggcgcttgcagcgacagaaccgcccaggtaaccaaacagaccggtaaagcccgccgccgtacccgccgcttttttcggcgccagttccagcgcgtgcagaccgatcaacattaccgggccgtagatcaggaagccgatgataatcatacaagccatatcaacgttcgggttccctgctgggttcatccagtaaacgatggtcgcgatagtcaccagggtcataaagaacacgccggtcgcgccacggttgccgcggaagactttatccgacatccagccacacagcagcgtgcccggaatacccgcgtattcatacaggaagtaggcccaggaggatttatccagtgcgaaatgcttcacttctttcaggtaggtcggcgaccagtcgagaataccgtagcgcagcagataaacaaacacgttggcgatagcgatgtaccacaacagtttgtttggcagtacgtactgcatgaagatctgcttcgcagtcagctcttcttccgctttttcgttgtagtcgtccggatagtcgtttttatactcttcgataggcggcagaccgcaggattgcggcgtatcgcgcatcattgcgaaagcgaacagcgccaccacaatcgcgccaaaggctggcatatagagcgccgctttccagtcgttaaaccaagccatccccagcaggaacagcagtggcgggatcccgccgccgacgttatgcgcgcagttccagaccgacacaatgccgccgcgctctttctgcgaccaccagtgaaccatcgtacgaccgcacggcggccaccccatcccctggaaccagccgcaaaggaacaacagtacaaacatcacggcgatgctggatgtcgcccacggcacaaagcccataaacaacatgactgctgcggccagaatcaaccctgccggcagaaaaacgcgcggattcgagcgatcggacaccgaacccattataaatttcgaaaaaccataagcgatggaaatcccggacagcgcaaagcccagatcgccgcgtgaaaaaccctgttctaccaggtagggcatcgcgagggcaaagttcttgcgcaccagataatacgcggcatagccaaagaatatccccaggaaaatctgccagcgtaatcggcgataggtcggatcaatctccgccgctggcaagcgcgctttatgcggcgctggtttaaaaatactcaacatattgtagcctccgtggcccatattttatttagaggtaaacaccgcagttcgttcaaacaaccccgctgctcccagtgtggccgcgatgttaagtaaagatacgtcacgttaatgtgaattacagcacatattgttacagatttatgactaatgttcagaaaggcgcacgaaatcacgtttcattttcgaatagtgagcgattatgcgcgaaatcaaacattacatatgatttgtatggctaaatgataaaaaacgaactgtgaggaaaaacaatgaaaactcgcgactcgcaaacaagtgacgtgattatcattggcggtggagcaacaggcgcagggatcgcccgcgactgcgcgctgcgcggtttacgtgtcattctggtggagcggcatgatatagcgaccggcgcgaccgggcgtaaccacgggctgctgcacagcggcgctcgttatgcggttaccgacgcggaatccgcgcgcgagtgcattagtgaaaaccagattttaaaacggatcgcccgccattgcgtcgaaccgacggatggtctgtttattacgttgccggaagatgatcttgcgtttcaggccacctttattcgcgcctgtgaagcggcaggcattcgcgctgaagccatcgatccgcagcaggctcgcatcatcgaaccttccgttaaccctgcgctcatcggtgcggtaaaagtgccggatggcaccgtggaccctttccgccttaccgccgccaatatgttggatgccagagaacatggcgcaatcgtgttaacggcgcatgaagtgaccgggctcattcgtgaaggcgcaacggtctgcggcgtccatgtgcgcaaccatctcactggcgaaactcagacgcttcacgcgccggtggtggtcaatgcggcaggtatctgggggcaacggatcgccgaatacgccgacctgagtattcgcatgttcccggcgaaaggctcgctgttgatcatggaccatcggatcaaccagcatgtcattaaccgctgccggaaaccatcggatgccgacattctggtacctggcgatacgatttcactgatcggcaccacctctacccatattgattacaatgagatagacagcaaccgcgtcaccgcagatgaagtcgatatcctgctgcgtgaaggggaaaaactggcccctgtcatggcgaagacgcgtattctgcgcgcgtattccggcgtccgcccgctggtggccagcgatgacgatcccagcggtcgtaacgtcagccgcggtattgtgttgttcgaccacgccgaacgcgacgggcttgatggcttcattaccattaccggcgggaagctaatgacttaccgcctgatggcggaatgggcgaccgatgccgtgtgccgcaagttgggcaatactcgcccctgcatcacggcggatacgccgttgcctggctcaaaagagtctacggaacatacgctgaaacgcattatctcgcttcccgcgccgctacgcggatcggcggtttatcggcatggcgatcgcacgccggggtggctgagtgaaggccgccaacaccgtagcctggtctgtgaatgcgaggccgtcacggcgggggaagtgcagtatgccgtcgaaaacttaaccgtgaatagcctgctggatctgcgccgtcgcacccgcgtagggatgggcacttgccagggcgaactgtgcgcctgccgcgcggccgggctattgcagcgttttaatgtgacgaccgcggcgcaatctattacgcaactctctgaatttctgaatgagcgctggaaaggcgtacaacctgtcgcctggggagacgcgctgcgcgaaagcgaattcacgcgctgggtttatcagggattatgcggtctggagaaggagcaccaggatgaaatttgatacggttattatgggcggcggtctcgccggtttgctatgcggactgcaactccagcagcatggattacgctgcgccatcgtcacccgcggacaaagcgcgctgcatttttcctccggctcgctggatctactcagcgccctgcccgacggccaaccggtgactgacattaccgccgggcttgatgcgctgtgccgccaggcgcctgaacatccttattcgcgtttaggcgcgcaaaaagtccttacgctggcgcaacaggcgcaaacgctacttaacgccagcggcgcgcagttatacggtgacgtacagcaggcgcaccagcgtgtcacgccgcttggcacattgcgttcaacctggcttagctcgccggaagtaccggtctggcccttatccgcacagcgaatttgcgtcgtcggcgttagcggattactggatttccaggcgcaccttgcggcagcgtcgctgcgccaacgcgacctcaacgtggaaactgcagaaatcgaccttccggaactggacgtactgcgtgataacccgacggaatttcgcgcggtcaatattgcgcgtctgcttgataacgaagaaaaatggccactgctgtacgacgcgctgtcgccaatagcgacaaactgcgacatgatcatcatgcccgcctgtttcgggctggcgaacgatacgctgtggcgctggcttaacgaacgtctgccctgcgcgctcacgctgctgccgacgctgccgccatcggtgctcggtattcgtctgcacaatcagctccagcgccagtttgtccgtcagggcggcatctggatgccgggcgatgaagtgaagaaagtcacctgccgtcgcggtaccgtgagcgaaatatggacccgcaaccatgccgatatcccactgcgcccgcgttttgccgtacttgccagcggtagcttctttagtagcggtctggttgccgagcgcgaagggatccgcgaacctattttagggctcgacgtacagcaaacggccacccgcgccgaatggtatcaacaacatttcttcgacccacagccctggcagcagtttggcgtcgtgacggatgacgctttccgcccctcccttgcgggcaacacggtagaaaatctgtatgcaataggttctgtgctggcgggattcgatcctatagctgagggatgcggcggcggcgtctgcgcagtcagcgccctccaggccgcgcaccatatcgctgagcgtgcaggagaacagcaatgagcgacacacgttttgaaagttgtataaaatgtacggtgtgcaccaccgcgtgcccggtcagccgcgttaatcctggctaccctggccctaaacaggccggaccggatggcgaacgcctgcgtctgaaagacggcgcgctgtatgatgaggcgctgaaatattgcattaactgcaaacggtgtgaggtcgcctgtccgtcggacgtgaagattggcgatatcatccagcgcgcccgcgcgaaatacgatacgacgcgcccgtcattgcgtaactttattctcagccataccgatctgatgggcagcgtttcaacgccgttcgcgccggtggtcaataccgccaccgcattaaagccagtgcgccagttgcttgattacgcgctcaaaatcgatcatcgccgcaccttaccaaaatactctttcggcaccttccgccgctggtatcgtagcgtggcggcgcagcaggctaaatacaaagatcaggtcgcctttttccatggctgttttgtgaattacaaccatccgcagctcggaaaagatctgattaaggtgctgaacgcaatgggtactggcgtacagttactgagtaaagagaagtgttgcggcgtaccgctgatcgctaacggttttacggataaagctcgcaaacaggctatcagcaatgtggagtcgctacgcgaggcgattgccgtcaaaggtattccggtcatcgccacgtcatccacctgtacgtttgcgttgcgcgatgaatatcctgaagtgctggacgtggacaacgccgggctgcgcgaacatatcgagctggccacccgctggctatggcgcaaactggatgcagggaaaacgctgccgcttaatcctttgccgctgaaagtggtctaccatacgccgtgtcatatggaaaaaatgggctggacgctttacacgcttgaactgttgcggcaaattccggggcttgaattgacggtacttgattcacagtgctgcggcattgccggtacgtatggatttaaaaaggaaaactatccgacatcacagtccatcggcgcgccgctgttccgccagattgaagagagcggcgccgacattgtcgtcaccgattgtgaaacctgtaagtggcaaattgagatgtctacaagcaaacgctgcgaacaccccattacgctactggcccaggcgctcggctaagtaaaaagcgccggagcccctccggcgccattaccctactcaccagggacgattttccatcagacatatacccttcatacttcaagttgcttatgtgttggctacggattattttgggtataaacgcggatgtctctttgcaataacctgccctatttggttaaccatgaccgctaacccacggtggcatgacagataacgacgttactgtttatagagcaatatctcttgtatcgacgcgttaccagccacctttaaagagggggataactgaatatccccaataataattgagtgttatgtgaataataagaaaatcaggtctatgcctgatttaatatatcccccgctaataataatatttttacaaataattatacattacatcatattcgctactttcacttaccaggaaacagagcaaaatgaatatatgtgtaaattcactttaccgattgagcataccgcaatttcacagcttatatacagaagaggtgagcgatgaggcgcttacattgttgtttagcgccgtagagaacggtgatcagaattgtattgatctgttatgcaatcttgcgttacgcaacgatgacctggggcatagagttgagaaatttctttttgatctctttagcgggaaaagaacgggatcatcagatatagacaaaaaaatcaatcaggcttgccttgtattacatcaaatcgccaataacgatataacaaaagataatactgagtggaaaaagctacatgccccttccagattactttatatggcaggttccgcgacaaccgacctttctaaaaaaataggaatagcacataaaattatgggcgaccagttcgctcagacagatcaagaacaggtaggagttgaaaatctttggtgtggtgcgcgaatgttgtcgtcagatgagctagcagctgcaacgcaaggtctggttcaagaatcacctcttctctcggtaaactatcctattgggctgattcatcctaccaccaaagaaaatatattaagcactcagctacttgaaaagattgctcaatcaggattatctcacaatgaagtcttcctggtaaatacaggagatcactggcttctctgtttattttataaacttgcagaaaaaataaaatgccttatatttaatacttattatgatttaaatgaaaatactaagcaagagattatagaagcagcaaaaattgcaggcatatcagaaagcgatgaggttaattttattgaaatgaatttacagaacaatgtacccaacggctgtggtctattttgttaccatacaattcaactcttatcgaatgccggacaaaacgatcctgctaccacactacgagaatttgcggaaaatttcttaacgctttcagtagaggaacaagcactatttaacacccaaacccggcggcaaatatatgaatacagtctccagtaatggtgagtacttagagcctatcccattaggctcttatcctgaaatgatgctctgcgaagaatttataagtatataagggtgggaaggccaggccttcccactaaaagttctatgccgtcaatgattcaaccacgtctatccagccatgctcgctggtaatgtcctcgccattaagccaacggcgcagcatatttagcgccatcaccgcacaaacctcctgacgtattgccagactataccgataggcgctaaaacgcatgcgtaaggcatacgtgccatccggcatttttctcaataactacgttttgccgtgcttactgactgaacagatttaaacatcgccaacctgctgtccagcgcctcggtgtagagcatcgtatctaccccgaccgcgacaaaattcgcgccccacgccagacatttctgcgccattgccggatcgaccgccaaaaaacccgccgcttttccggcggcgcgaatacgataaatacacgcttcaatgattcgctgcacttccgggtgtccggcattatcggggtaacccaatgaagcagagagatctgccggaccgataaagacgccatcaatgccttcaacctccagaatcgcgtcaaggttttccagcgccactttgctttcaacctgcaccaacaggcagagcgactcattggcctgtgccatatagttgtcgattctcccccagcgcgccgcacgcgccacgctcgcgccaacgcctcgttgccccaacggcgggtatcgggtagcggaaacgacctggcgcgcctgttctgcggtgtcaaccatcgggatcagtagcgtttgcgccccgatgtccagtacctgtttaatgagcgctttacttccctcgatcgggcgaatcaccggctggctggcgtatggggcgatggcctgtaactgatgatacaagtcctgcaccgtattaggcgcgtgctcgccatctattaacaaccagtcataacccgacgtcgccgcaatctccgccatataagaggtggttgaactgagccacaaaccaatttgcgtatcccctttacgtaatccttctttaaaaggatttgataacaatgcgttcatagcgatccttacaacgtagataagattaatgatgcgcagcgccggattgcgccaccggacgattaacgctcagcgtgaagataattaatgagccaatgatggcgactccggccagcgtcagcaggcccgccgcatcgctggcaaacaacgtttccgcttttacgcgcagaattggggcaataaaaccgcccacagcgccaaacagattaacgaaaccaattcctgccgccagagccgtaccggaaagtagctgcgttggcatggtccagaatacgggctgaacggcaataaatcctactgctgcaacacagagcgccagaatagcgagcaccggagaaaccagacctgacaggccaatgccaatgcccgcagccagtagcgtcactgccgcaacgttacggcgatcgccggtacggtcggagtagcgaggaataagccatgtgccaagcaaagccgccacccagggaaccgctgttaccaccgaagcggtaaagcccactttagtgcccaatagcgcggcaacctgggtcggcaggaaaaagatgagtccgtataccgccacctgaatcgtcagataaataatagccagttgccagacgcgtccattacgcagcgcatccgcaagccttgacgtgacctttttctcttcttcgctcgccagttgcctgataagcgcgttcttttcttccaggctaagaaaacgcgcctgctgcggagtgtcatcaagccagaaaaaggtgaatatccctgcgccaatcgccagtaggccttcgataacgaacatccagaaccatcccgggtgccccataaaaccatgcatctccagcagagcgccggagagcggcgaacccaacgttaacgccagcggcgcccccatataaaatagccccataatgctggcacggttacgctgcgggaaccattgtgaagttagatagatcatgccggggaaaaatccagcctccgccgcgcccaatagcgtgcggattatcagaaattttgcttcactatccgcccaggccatcgcagcagagagaaagccccacagcagggtagtcgtgccgatccaggttcttgcgccaaatttgcgcatcagcaggttagccggtacgccaaggaaagcgtaaaccacaaagaaaataccggcccctagcgcgtaggcttcattacttagcccggtatctatctgataggtctctttggcaaaaccaatatttgaacgatccagaaacgccagtacatacagcgccaacataaaaggaattaaacgtgcgcggtttttcttcactacgccgtcaagtaaagtgatgctcatagcaatatcctcaacaggatgagggcgttgccgtacaaaggcaacgcacgagttattagtggctataagggcgtttcaagtgacagtcacggttaagctcgacgccgaagcccggcttatccagcactgatttatggatgcgtccattcaccggcaccggctcatccaggagaatcgggtcaaattgcggacgcagagtggagcagtccgggctggtcatcaggaactcgctgaaaggggtattagtgaaagtaataactgcatggtgcgaatagacagacgaaccgtgcggcaccaccagttgcccgcgcgatttggcaagcgcggcgatctcaaccagcgtggttaatccgccgcaccagccaacatccggctgcataatatcaatgccggtttctgccagagtgcggaaggattgcagcgtaccatggtgttcgccgctggtaaccatcatccctgcaggcgcgttgcgttttaattcgcgatagccttcatactgctgcggcggcagacactcttcaatccatttgagattaaatggcgcacaggcgtgagccagtttagtcgcatagttcacatcctgactcatccagcagtcgagcatcagccagaaatccggcccgcacttttcacgcatatccgccaccatcgcggcatctttacggatccccgcatcaccatcgtgcggtccccagtgagtcggcattttaccgccgataaagcccatttctttagccagatccgggcgtgcgccggtggcgtaaaactgaatttcatcgcgcaccgctccgcccagcaatttataaaccggcagcccaaccaccttgccaaacaaatcccacaacgccagatccacacaggaaatcgtgttcatcaccagaccgccggaaccggagtagtacatggtcgcgccgagcatctgatcgtgaataagtttgatatcgcttacgcatttgccttcaataaaccggttaagatgtgtttctacgataaaacagcccatctcccctgctgtcgaaacggcgaaccccgtctgcctattttccgcctctacttcgacaatcagcgtccctaacacgttgatcccaaaagactgacgagactgctcatagtcgcgatatttgctcatgggagtggcgatatggtcatcaatccagtgatttcctccctggtcgtgataatccccgccgccagcccctttctctgcggtagcgcccccaataaaccaggctcgaacgtgtttaattttaggaagagtcataatattctccattttaagatgcgagtgagtcgaagggacttttccatcccaacaggcgtgaaatatctttggcacaggcaatagctttaccggccaaataatctagattctcttcgttgatttgcaggcgcgtgccgaccactgaaattgccgcggtcagttcgtttctggcattaaataccggtgcggcaacgcagcggacatccggataatcctccccgttatcaaagctccatcctcgctggcgaatgcgctccagctcatcattcaattgttgcggctcggtgatggtggtcagcgtggctcgctcccataccagttgttcaataatggctttgcgtacggcggccggctgccatgccagcaggcatttgccgatgccggaacgataaagagagaggcttttcccctcatgcgagcgcacgctgatagtggatgaggattccactttcagtatgtaatacgcattttcgtggtcgatgatccccaagtgacacagcagcccggtttcatccatcagttgtgttagacgaggacgcgccagctcccgcagatccatcttgctgagcgcatgacccgacaattcaacgagcttagtccacaggcagtagttatcctgatgatcgaggctaataaatcgctgacgttttaattcattcaacagcaggtacgcggtgctttttggaatacgcagcgtttcaataatgattgccgcgctgcatgggccaatacgcgcgatcaaattgaggatgtcgattgcgcgagtaagagccgggactttacttgattccaacatattggactccagtctgagacactggaatcagtgtgaaaggtcagtagggaaaaaattgtgaagcgcgtcaaagcttatccgccttccaacggagtggaagggttaaccatataaatgtgaattaacgcacgtattactttgtattcagtacaattggctggacaaaaaagcagatgatattgccggataatggcatagcggccttatccggctcacgatgtcgttcccatcgcagataagagaaagggattatgatgtcaatgattcaaccacgtctatccagccatgctcgctggtaatgtcctcgccattaagccagcggcgcagcatatttagcgccatcatcgcgcagacctcctgacgtattgccaggctataccgattggcgctaaaacgcacgcgtaaggcatacgtgccatccggcgtcgccagcgcgaaattaagatgttcgttttccagccccgacacggccagcgccagaccggcataatgattgctgcgccgttctgtcgtccagtgtgccgtttgcgccagcgtctcttcctgagaaggaacgacttcgctggcaagaacaggcgccccggcgcgggaaagctgtagcgccagtaagccgctggtgtattgctcgctcaacgtcagactcaactgcctttcctgcaggcggcgggctatttgcgccggcaggttttccgtaccttcaaaaatcaggttctgcccggcaacccgtttgacctctggccataacgccagcatcgcctcccgttgcgtcgccgggccggtcaatttcagttcaatgatcggcattgatgagcgataccccatcgtcacgccgggcggcaacggcagtgaatcgagacgctgcgcgaggtcactttctgaacgtccaaaagtcgttaaccgcaggcaaagcggcggctccggcagcgaaaaacgcgcgcgtaaccgcggtaagatttccttctccaccataaccttaaattcagacggtacgccgggggtgaaaaacatcaggcagcggttgagctgtagcgcaaatccacaggcagtgccgagcggattattaataaactccgcgctggcaggcagttccgcctgtttacggttgctcggcgccatcacgcggccacgctgctgaaagtagcgttccatttcggtcagccacgcctggtgcagtactaatccttcgccttttgccgttgccgcggcgagcgcgcttaaatcatcgctggtcggccctaacccgccattaacaatcaaaacatcagcatgttgactgcgttcacgcaagatagcgaccagactgtccagattatcgcctaccgtatttcgccgtgataacggaacgccctgatgaaagaaaaaatcagccagccaggcggcattggtgtcaacgatttgtccgtgcaacacctcatccccggtggatagcatttccacatttagcattgtgttctcctgctcttatgatgaaaacactataacgcaaagacgaatatgacgtggaaagaagaatgacgggaacaggaggaatatggcgcgacgattgccgcgccgttagcatcaaaagctggcgtttacgccaacataagggccgtcagcaatcgcattatcgcggttgccgtctttacccgccaggttcaggtaacgataaccggcttcaatgctcagcgggcgcataatggtgaaacgcgcgcctgcattcgcttcttcataactgtcgataccgctggacagcgaatctggtgaataataatactcgccgaacagacggaagctgttgccgattttccattgtagcccaccgccgacagccgccgcatagccttcatcgctgtctttcggattggtataaatacctttaccgccgaccgtcgccagcagcggtcccaccggaatgttcagccccagacccacgcccgcagcatcgccatcatcatcgttgtgcatccagttgccgcttagcgccagtcccgtcgattccgtaccaaaacccacgccaatgttggtgtaatcttcgcccgcctggccgctaatactgatggcctgcgccgatgcagaaacgaacagcattccggcaaaacctaataatatgctttttttcatttttaccctttccagcaagcacataaagaaaaactccccaaaacggcagaattgtactgccagacgctgaggaatcaatgcactaagaaaccattccaaaaacatattgtaacgaaatactactttcgccatgacgcatcattgcgccatcacatggcgacgcctgcatcaacaaaattaacaaaaaacgcagtctgcgttatcgcttccatttttcacaaagaatttcgcagaatgatttgttaagctgatggcctggtggtttaaggaagcgacttatgcgtcaacgaactatagtttgcccattaattcaaaatgatggctgttatctgctgtgcaaaatggccgacaaccgcggcgtctttcccggtcagtgggcgctgtcgggcggcggggtcgagccaggcgaacgcattgaagaggcgctgcgtcgggagattcgggaggaactcggcgaacaactgattctgagcgatattacgccgtggaccttccgcgacgatatccgtattaaaacctacgctgatggcagacaagaagagatttatatgatttatctcatcttcgactgtgtttccgctaaccgcgatatatgtattaacgacgaatttcaggactacgcctgggtcaagccagaagaactggcgctgtatgatttgaatgtagcgacacgccacacattagcattgaaagggttattataatgacgacagccgcttcaggctgtctttacgcttttaacatgcggctagccgggaacaaattcaccatctaaaaagagttttccgttttccgcatgcataacgagcgcattaagatagtccggatcaaactttacgccgcgcttattttttgcaatatacgtcaaacaatgattatgggtaaaaatgactatatttttattctgcgactttttcagtaacgtattgattgaagcataaataccgctgccgcaatccatcatttttttatccaccgtaagcgacctgcccgcagaaaaccaggttgccgactggatggtgcgcaccgtattactggaatagagattgtaattttgtatatcggcactgaaggctttacccagcgctctggcatcttgcgcacccttgaccgtaatccccgtgctgtctgacaggcaggtattatcggaacgatcgcaccgctcggcatggcggaataacacgactaccggatgctgcttcgccagcgccgccagcgctttaccgttaatctgcggtagaccgttaccactccaggcatgttgtgaggtcaacccggcgataataaccaacgcccccgccagaatcgcgaaatagcgtttgtttttaataaagcgtagggtaaatgccagcacattaacctctcaggcagacagtgcagctaacttaatagcaatacaattaaaatgaaattccgcaacggaagaccaggccagaaacataaaaacagcttttgggcatgcataaaatgccttaaactttcggcgaaagcaaagcataattccgttaaaaattatctttttacttcaccttaatttcttaatgttaatttaatcttcatccagtagggttcagctaaatgcgttaaaaaataagcccttttctattgccgaaatatttgaaaagcggctttcaatggctgaaggaaaaatgatgtcggactttttgcctttctcccgtccggcgatgggcgcggaagagcttgctgccgttaagaccgtactggactcaggttggataacaaccggcccgaaaaatcaggaactggaagcggcgttttgtcggctaactggcaatcaatatgccgttgccgtcagttcagccactgccggtatgcacatcgcgttgatggcgctgggcattggtgaaggcgacgaggtcattacaccgtcaatgacgtgggtttctacgctaaatatgatcgttttactcggcgcgaaccccgtcatggtcgatgtcgatcgcgatacgctgatggtcacgcctgaacatatcgaagccgcgattacgccacaaaccaaagcaattatccccgtccactacgctggcgcgcccgccgatctggacgctatttacgctcttggcgagcgttatggcattccagtgattgaagacgcggcgcacgcgacaggaaccagctacaaaggtcgccacattggcgcccggggcaccgcgattttctccttccacgccattaagaacattacctgcgctgaaggcggtatcgtcgtcacggataacccgcaattcgccgataaactgcgcagtctcaagtttcacgggcttggcgttgatgcctgggatcgacagagcgggggacgcgcgccacaagcggaagtcctggcgccgggctacaaatataatttgcccgacctcaacgccgctatcgcgcttgcccagttacagaaactggatgcgcttaacgctcgacgcgccgccatcgcagcgcagtaccaccaggcaatggcagacctgccttttcagcctctgagccttccgtcgtgggagcatattcacgcctggcatttattcattatccgggtcgatgaagcccgctgcggtattacccgggatgctctgatggcatcgctgaaaacgaaaggcatcggcacagggctgcatttccgcgccgcgcatacgcaaaaatattatcgcgaacgtttcccaacgctcacgctgcctgacaccgagtggaacagcgagcggatctgctcactgccgctcttcccggacatgaccgagagtgactttgatcgagtcattaccgcccttcatcagatagcaggacaataagcatgtttgacgccgcccccataaaaaaagtctcggtggttattcctgtctataacgaacaggaaagcctgccggaattgataagacgcaccaccaccgcctgcgagagcctgggcaaagcgtgggagattttattgatagatgatggtagcagcgatagctcggcggagctgatggttaaggcgtcccaggaggccgatagccatatcatctctattttactcaaccgtaactacggtcaacatgcagcgattatggcggggtttagccatgtaagcggcgatcttatcattacgctggatgccgatctgcaaaacccgccggaagagatcccgcgcctggtggcgaaagccgatgaagggttcgatgtggtaggcaccgtgcgccagaaccgacaggacagcctgtttcgcaaatcggcgtcaaaaatcattaatctgctgatccagcgcacaacgggcaaagcgatgggcgattacggctgcatgttacgcgcctatcgccgccctattatcgatactatgttgcgctgccatgaacgcagcacctttatccctattctggccaacattttcgctcgtcgggctaccgagatcccggtgcatcacgctgaacgtgaatttggcgactctaaatacagttttatgcgtctcattaacctgatgtatgacctggtgacctgcctgacgacgacgccgctgcgcctgttgagtctgctgggcagcgttatcgccatcggcgggtttagcctgtcggtattgcttattgtacttcgcctggcgctggggccgcagtgggcggcggaaggcgtatttatgctctttgccgttctgtttaccttcatcggcgcgcaattcatcggtatgggactgctgggcgaatacatcggtcgcatttataacgatgtccgcgcccgcccccgctattttgttcaacaagttatctacccggaaagcacgccgtttactgaggaaagccaccaatgaaagccgttatttttgcctatcacgatatgggatgtcagggggtgcaggccgtactggatgccgggtatgagattgccgcgattttcactcatgccgacaatcctgcggaaaacaccttttttggctccgtctcccggcaggcggcagaattagggattccggtttatgcaccggataacgtaaaccatcctatctgggtcgaccgcatcgctgagcttgcgccggatattattttttcgttctattaccgcaacctgttaagcgaagaaattctgcacctcgccccggctggcgcgttcaatctgcacggttctctattgcctgcctatcgtggccgtgcgccgctaaactgggttctggttaacggcgaaagcgaaacgggcgtaacgctgcatcgtatggtcaaacgtgccgacgccggagagattgtcgccagtcaacgcgtcgctattgcgcaggacgatgttgcgcttaccctgcatcataagctatgtcaggccgcgcgccagttgcttaatagcatcttgcccaccatgaaatgcggcgatataccttctgttccccagcgtgagtctgactctacgtattatggtcgccgcaggccggaagatggccttatcgactggcacaaaccggtttccacggtgcataacctggtgcgggcggtagccgccccctggcccggcgcgttcagctataacggctcgcaaaaattcactatctggtcttcccgaatgtgtccggatgcgcaaggcgcgcttcccggctcggtaatttcggtctctccgctgcgggtcgcctgcgccgatggcgcgctggagattattaccggccaggccggagacgacattactgtacagggctcgcagcttgcacagacgcttggtctggtggcgggcgcgcgtttgaaccgtccaccagcgaccagcggtaaacgtcgcattcgcgttctcatcctcggcgtcaacggttttatcggcaatcatttgaccgaacggttactgaatgaagagaattacgaggtctacggtatggatatcggcagcaacgccattagccgattcctgctccaccctcgatttcatttcgtggagggagatatcagcatccactcagaatggatcgaatatcatgtcaaaaaatgcgatgtcgtactgccgctggtagcaattgcaaccccgattgaatacacccgcaacccgctgcgcgtctttgaacttgattttgaagaaaacctgcggattatccgttattgcgtgaaataccgtaaacgcgtggttttcccgtctacctctgaagtgtacggcatgtgtacggacgcctcttttgacgaagacaaatcgaatctgatcgtcgggccggtgaataagccgcgctggatttactccgtttccaaacagcttctcgaccgggtgatttgggcttatggcgaaaaagagggattgcgcttcacgcttttccgtccctttaactggatggggccgcggctggatagcctgaacgcggcgcgtatcggcagttcacgcgcgataacgcagttgattctgaacctggtagaaggaacgccgatcaagcttatcgacggcggtcagcagaagcgctgttttaccgatattcgcgatgggatcgaagcattattccgcattattgtgaatgatggcgatcggtgcgatggcaaaatcattaatatcggcaatcctgacaacgaagccagtattcaggaactggcgacgctgttgctcgacagttttgataagcatccgctgcgctgccatttcccaccgtttgccggtttccaggtcgtcgaaagccgtagttattacggcaagggttatcaggatgtcgcacaccggaaacccagtatcgacaatgccaggcgctgtctgggctgggagccgtctattgcgatgcgtgatacggttgaagaaacgctggacttctttctgcgtagcgtcgatatcgcggaacgcgcatcatgacgaaagtcggtttacgcattgacgttgataccttgcgaggaacgcgtgaaggtgttccccggctgctggcgacattgcatcgccacggcgttcaggccagctttttcttcagcgtcgggccggacaatatgggacgccatctttggcgtctgataaaaccgcgatttttatggaaaatgctacgttcaaacgccgcttcgctctacggctgggatatcctgctggccggtaccgcctggccgggaaaaaatatcggcaacgctaatgccgggattattcgtgaaacggcaacataccatgagacgggactacatgcctgggatcaccatgcgtggcagactcacagcggccactggagtatccgccagcttgaagaagatattgcgcgcggcataacggcgcttgaggccattatcggaaaacccgtcacctgctcagccgcggccggctggcgagcggatgggcgcgttgttcgtgcgaaggagtcgttcaacctgaggtataacagcgattgccgtggaaccaccttattccgtccgctactgatgccgggccagacagggacgccgcaaatcccggtcaccttacccacgtgggatgaggttatcggccccgccgttcaggcgcagtcgttcaatacctggattatttcccgtatgttgcaggacaaaggcacgccggtatataccatccatgcggaagtagaaggtattgtccatcagccgctgtttgaagatttgctcgttcgtgcacgcgatgcggggatcaccttttgtcctctgggcgaactgctgccggcatcgcctgagtctctgccgttggggcaaattgtacgtggacacatccctggccgtgaaggttggctggggtgtcaacaggcagcgagcgcctcatgatgaaatcgatacgctattatctggctttcgccgcgtttatcgcgctctactatgttattcctgtcaacagccgcctgctctggcagccggatgaaacgcgctatgccgaaataagtcgggagatgctggcgtctggcgactggatcgtgccgcattttctgggattacgttattttgaaaaaccgatagccggttactggataaacagtctgggtcagtggctttttggcgctaccaattttggcgtgcgggctggcgctattttaacgacattgctggccgcagcgctggtggcatggctgacgttccgcttatggcgggataaacgtaccgcgttgctcgcctccgttatctttctctccctctttgccgtttacagtatcgggacgtatgcggtactcgacccgatgatcgccctttggcttacggccgggatgtgttgtttctggcaggggatgcaggccacgacccgaatgggcaagattgggatgtttttgctactgggcgcaacctgcggtctgggtgtattaactaaaggcttcctcgccctggccgtacctgtggtgagcgtgctgccgtgggtcattgtccagaaacgctggaaggactttttgctttacggctggctggcggtcttgagctgctttgtggttgtccttccctgggcgatcgccattgcgcggcgcgaagccgatttctggcattactttttctgggtggagcatatccagcgattcgccatgagcgatgcccagcataaggcccctttctggtactatctgccggtactgctcgcgggaagtttaccgtggctggggttactgcctggcgcgcttaaactgggctggcgcgagcgaaacggcgcattctatttgctcggatggacgatcatgccgcttctctttttcagcattgcgaaagggaaactgcccacctatgttctttcctgtttcgcaccgatagcgatactcatggcgcgcttcgtcctgcataacgtaaaagaaggcgtcgccgcgctacgtgtcaacggcgggatcaacctggtgttcgggttagtcgggatcgtcgcagcgtttgtcgtctcctcatggggcccgctgaaatcgccggtgtggacgcatatcgaaacctataaagttttttgcgtctggggcgtctttactgtttgggcgtttgtgggctggtatagcctctgtcatagccaaaaatacctattacccgcgttttgtccgctgggactggcgctgctgttcggcttttccatccccgacagggtgatggagtccaaacagccacagttttttgtcgaaatgacccaggcgcctttggcatcaagccgctatattcttgccgacaacgtgggcgtcgccgccgggctggcctggagtctgaaacgagacgatattatgctctacggacacgcgggcgaactcaggtatggtcttagctatcctgatgtgcaggataaattcgttaaagccgacgattttaacgcctggctcaaccagcatcgtcaggagggcattattacgctagtactttcaatagccaaagatgaagacatcagcgctctttcccttccccctgcggacaatattgattatcaggggcgtctggtgttaattcagtatcggcctaaatgatcggcgtcgttctggtgcttgccagtctgctcagcgttggcggtcagctctgccagaagcaagcgacacggccattgacggcgggcggacgccgccgtcacctgatgctgtggctgggcctggcgctgatatgcatgggcgcagcgatggtgctgtggctgctggtgctacaaaccctgccggtgggaattgcttacccgatgttgagtctgaattttgtctgggtcacgctggcggcctggaaaatctggcatgaacaggttccgccccgccactggttgggcgtcgcattgattatcagcggcattatcattctggggagtgcggcataatgggcgtaatgtggggactgataagcgttgcgattgcctccctcgcccagttgagtttaggattcgccatgatgcgactgccatcgatagcgcatccactggcgtttatttccgggctgggcgcatttaatgccgcgaccctggcgctattcgccggtttggcggggtatctggtttccgtcttctgctggcagaaaacattacacacgctcgcgctcagcaaagcctatgcgctactgagtctcagctatgtgcttgtctgggtagcctcaatgctgttacccggtttgcaaggcgctttcagcctaaaagcgatgctcggcgtattgtgtattatggcgggggtaatgctgatttttctgcccgccagatcatgatggcttgcgcgtcaaccgctgccattcgtcgcaggaataacagcgtgcatcaacgatttttaaggtctggtgtttttcccgattaatacaatactgcgcatcctgtaaaggcgacaggatatcgccgggactcagtaatatcatggaattcgcctcggcgatcatttttagcgaaccgccgctatcgcacagcaccagaacatggcacgccctctttttgacataatgcgatttcttaaccaaccattccatagcgcccccgtttcacgctgattgttcataacacgttacacatcaacggataaacaaaacggcaatagcgatggaatggttgtatattaacctaacattaatttttacagttctcacacacccactgctggagcgcacggcgagatattttaatccctccgtttttcagttctgacggcatcgtcaaccagcgaaccggctgttgaaaacgcgccagcttatcacgaacccattcagcgaggttcacgtctccggcctgcgatgcatactccacaaccgcaacgggacgatgaccaaactctttatcttctaccggcacgacgaaggcttgttgcaccagcggatgcgcattaataacgcgttcgacttcctccggctgaatgccttcgccgccgctaaagaacaggttgtccagccgcccggcgatggttagcctgccgtggttcagctcgccgcgatcgcgcgtggcaaaccagccttcgtcattaaccagcgggatcagtttgccatcacgccagtaaccttccgccatactggcggcgcgcagccagacttcattatcgacgattctgatctctctgccgggaagcggcgcgccaacatcatccgaaccatcggcctctttggcgcataccgtagacgcgaactccgtgagcccatacccgcaccagcagcgaatcccttgtttgctggcctggtcggtgagttcaaccggaatcaccgcgccgccgagcaaaacggctttcagcgtcaccgccgcccgattcgccagcagccgccacagctgcgtcggcaccagcgaagcatgagtacaccctgccagcatctgctccagcggttgcttatcgcgtaccgtcatgcgcgccccggcgaagagccaacgccacataataccctgcccggatacatgaaacagcggcagcgatagcagccagtcatcctgagggccaaacggcattagcgaaagcaccccctgcgcgctggcaagatgcgcctggcacgtatgtacagccgcttttggcaatcctgtggaacccgatgtcagcgtcatggaaaccagacgctgcggttgccaggccacagcatacgccgctgtactcttttgtatctgcaacgcggttaatccagaaaacgcattttcgccttccagtgtcagcgcaaaacgcagcgttaacttcggcaccagcgcctccagcaatgtctggggcaactgcgggttgacgggcagaacccgcgcgccgcactgcatcagcgcaagccatgccaacagagtgcgcggctgattcccggcgcgcagcaggacaccatcgccctcgcgtacgccctgcgcggcaaacccgcccgccagcacatcaatacgctcacagagggcgcgccagcttagcacttcatcgttcaggcgcagagcgggcgcctgactgcgaacctgacgccagtggcgccacggccaatccgtgaatgtcataacagtcgttccagctcctcacgcttcagacaaggcaacgcgctaccgggccaggggcgaatctgttgcgcctgcatcagatgcaaggtatccagtccaggcagcgttcccggcgtcaaccaggcggcaatccgcgccagttgcgtcaggccgaggctggactcgatcgaagagctgatgaccgccgtcagtcccaacgcatgggcggcagcgacttgctcacgcactttatcaagcgatccggtcagcgtaggtttgataaccacagccctgacgccctcttcggcttcaaaggtgaaatccgcttcgcgcagactttcgtcccaggcaatcgcgatgccggtttcacgggcaaaggcgcgggaatcatcccgcgtcttacacggttcttcgagaaaggcgatacgagcgcggtaatccggattaacatactttgcaaactgttgggcttttagcggcgtccaggcgcgattcgcatccagacgcagatgcagatccgggatcgcctccagcagcaaattaaccaccatgccgtcgcgtaccgcttcataaagacccactttgaccttagcgattttctcgccgggcatatcggcaagccgcagcaccaaatcgtcaggatcgccagtgcataacggcgcggcgcgatagtccgccgcctccggcaagacgccagtcagttccgccagcgcgcagcttgcgccaaacgcgaccgaaggcatctcgggtaatccctcgctcccctgaagccagtcgttcacccatgttagtagcgccgtctgcgcctcttcccacgtttcctgactgaagcccggcagcggagagatctctccccatccctcacgctcgccgtcacgcagacaaacatacagcccgtcgcgagtttttaaccgcctgtcgcgcagaaccacccccgcgtccatggggatctgccagcggtatacctgcgcgctacgcattatgggttccgtttgaatttgctgaagtcaggctgacgcttctggttaaaggcgttacggccttcctgcccttcttccgtcatgtagaacagcatggtagcgttgcccgccagctcctgcagcccggcctgaccgtcacaatcggcattcagcgccgctttcaggcaacgcagcgccatcggactgttttgcaacatttcgcggcaccagcgcacggtctctttttccagatccgccagcggaacgacggtgttaaccagccccatgtccagcgcctgttgcgcatcgtactggcggcacaggaaccagatttcacgcgctttcttctgaccaacgatacgcgccatatacgaagcgccccagccgccgtcaaaggagccaactttcggaccagtctggccgaagatggcgttttccgccgcgatggtcaggtcacacatcatgtgcagcacatgaccaccgccgatggaatatcccgcgaccatcgcgacaaccggttttggacaggtgcgaatctggcgctggaaatccagcacgttcaggtgatgcacgccggagtcatcctgataaccgccgtaatcgccgcgcaccttctggtcgccgcccgcgcaaaacgctttatcgccttcgccggtcagaataatcacacccacgttgtcgtcgtaacgggcatccgccagcgcctgaatcatctctttgacggtcaacggacgaaatgcattgcgcacctgcggacgattaatggtgatttttgcaataccgtcggtggatttttcataacgaatgtcggtgtaaccctccgagcagtcgtgccattctaccggtgcgtaaagcattgtttcatcaggatagatcatagtgtgtcctttagtcagagacgcagaatctgagccagactgtctaccacgccagcggggttttcccgatgcgcgttgtgtccggcgttacgaatgacatggcatgtcgccgccacttcctgcgccagggcgcggaatttgctgtcgcgttcgccacataaataataaaacggaaatgccagcgcgttgagcgcctcgcgtaaatccggctggacggcaagcgatgtcgcctccagcatcgcagccagcgtttcgccgttattctggctacgcagcgccgttagcgcctgtctttgctgcgccgtcagcgaggcgaacaccggctgctgataccagtcgtgaaaaacctcagtcaatggttcatgacgaaaacgctctgcccagcgcccgtcggacaatcgtctttcagcgcgcgcctgttcattttgcagccccggatgaccgccttcaaccaccaggccgcacaggccgggtattccctggcaggctgccatcatcgccacccggccgccaagagagtatcccaccaaccaaaactttagtatgttgtaactaattaacgtagcgcgcagcaatctgatgacatcggcaaatccgtcgaccggaatagccgcagatccgccatgtcccggtaagtcaatatagagccgcgaacagccgtgaaactgttcgccaaccggctgccattcgtggcaatcgccagaaaaaccgtgcaggaaaaccagcgagggcgtcccaggctgtccgggcatgtgctgcgcgtgcaacatcatagatggcttacctgagccaaaagttgctgcaacgtctgcgcgccgtccgtatcgtttaccaccagctcaatcaccgttgtcgccggggttcgccacgcgccagccagcgcagactccagttcttcccagttttccgggcgatgatagcgcaggttaaacatggcggccgcatggtcaaaatggacgttttgcggcatcaaataaaagcgctcacgtttgctttgcggcgtcggcagcagggagaagatttgcccgccgttattgttgaccacaatcaacacaaacggcgcggatacctgacgtagtaacgccagcgcgttaagatcgtacagcgcggataaatcgccgacgatagccagcgtcgatttagcgctggcgcgctgcacgcccgccgccgtggaaagcaggccgtcaatgccgctcgccccgcgattgctgtataccggatagccagccggcaactgtgacagcgcgtcgatcagacgcaccaccagactattgcccacgaacaattgcccctgctccggcagatagtcgcggatacggtgcgccagctgcgcttcgccaaaggtgtctcgctgcgcgaccacccgttgccacgccagttccgccagacgcgggatctctacacaccacggtttacgtttttccgccggatgcagttccagccaatcggcgattttcgctaccagtctgcgtccacgatggtgcgccgggtccagacgaccttcaatattgtcgattacccagtactcttccggctcgcaggttgcctgccattgcagtaagcgttttccggtaaggctactgccaagctggacgacaatctgcgcctgctgcagttcggtcaccgctttggcgttgccgagccacaggtcggcgcacggcagcggctgcccggtttgcgacaatacgtcgccaattaatggccatcccagagtttgcgcccactgcgccacttttttgccttcttccgcgctcatacgcccggcgacgacaacgccgcgtttttgtcgccagaagaaccagtcgcgctgtttgtcgctttccagtcgacgcgcttcgcgcagccagggtttttcatcctgccaccagtcgccgagacgctgctgccagaccagaccggtatcattcatatcgccatacagcggttcggcaaaaggacagttaatgtgcagcgcgcccgcatgaagcatggcgagcgcattgtcgatggtcgacaccagccagcgcgccggaatatcctgcgtgggacgcggcaacgacaaagtttgggaggggtgcgaggcaaacatccccgcctgacggatcgcctggttggcgccgcagtcaatcagctctggcgggcgatcggcggtaagtaaaatgagcttctcgcccgtcagccccgcctcaatcaacgccggatagaggttcgccacggcggtacctgaagtgacaataacggcaaccggctgttggctgactttcgccagccctaacgccagatgaccaagcccacgctcatcaaagtgcgtatggtgaataaaagcaggattctctgccgccgccaacgtgagcggcgtggaacgggaaccaggggcgatacaaacatgcctgacgccatgacgggttaaggcttccaggatgaccgccgcccagcgccggttaaatgcacttactgacatgagtttgtccggtatcaatcattgggactaagtataaagagctgcaaaaatggattattgatatgggtcgggaatatgtgactcattacgcatccatctgcaataaggtacgtaacccggccgctttattatctatttcctgccattcctgttccggatcggagccgcggacgattcccgcgccggcatacaatcgcaccacattggccgtcactttggctgaacgtaacgtcacgcaaaactcactttgccgcgtggagagatagcctgccgacccggcataccattcacgttcgaacggctcatgttgttctataaaacaacgcgcgggttcacgagggatcccggcgaccgctgcggtaggctgtaactggtgcaggcagagcgtgtcgtccgcctgattaagcgccgtccagatacagcggcgcaaatgctgtaccttgcgcagtctgagcacctgcggcggcagcacatccagcgagtgggtgcagttttgcagtcgctggcagatgtcttcgacaaccagcatattttctcgctggtttttatcgtctttcattaaccattcgccaagctgccaggctttatggttatccggatggttcgccaccgtcccggccagcgcttcggtacgcagcgccgtttcacgccgccgccagagccgctccggcgatgatcccagaaaggcggtatcggcggaaaaggccataaaaaagtggtagcagttgagatttaaacgacgactggacgccatcatcgcggcggcattgaccggacgggagaattgtaagtcggtggcccgcgccagcacaactttatcaaacgcctcttgcgcaatggtgtgggtggcctgctgaatcagcttcacccaaccgtctttgtccggccagtgttgttcgctcgtgagcgaaaggcgtagcgccggaacaggcttaatgccgaccagagaagcgagaaacgctttcgcctggcgcgcatcatcgcgtagcgaaacgtcactgtgcagatgtaagcgtaaggtcgccgtaccaccgctacgtcgccactccagccgcggcagcaataagtagccctctttcggctcgaacgcattcagcccccaaatacgcaggtcaggctgcgcgtgctgacgtaaaaaccgttgcgccagatcgagcgatgaaaatacggtgatggccccgagaacggcagcttcttcgtcgccattgcgctgttgccagtagaattgcggaaaggatgactggctggccagccagctcaatgcatcgaaggcatcgtttaaagggaaaggcgcatcgaaaacgcaaagccctggcgtcgccggtatctcttgcgatagctgacgcgtcagattttccagcgcagtagtaatagaatgcacgcggaccctccctgttaaaaaccccacattatacggggtactgccctaaaaaagcagtacctcatttagggagggttgcaattctgttcagtggggggatttagcgccgcgccagcagcagtccaagcaccagtcctaccgccgcgcctacgccaataccctgccagggtttttcatgaacgtagtcatccgctttataaacggcctgctttgcccggtaataatagctatccgacgcatggcttacgcggtttttcacctcttccagcgcttgttccgcgcgggctttcagctcaatgtatttttgatcggcgggatcgcctgaggaacgtaaaacctcttccagcgtttcgctgagcaaagtcagatcatcatcaacacgtgattcaccaaattgatatgacattctcattctccgttgtgttaacacctgctcctaactatagtcaacggtttcggtttatgcctgatgaacctcccgcgccattccccggtgcggaatgccgtcttcgtcataaacatcggtgacgggaataaaaccaaaccgcgcataaaaaggttgcagatgcgcctgcgcccccagatatagcggcttatccggccagtgccgcccacaagattccagcgttttcgccattaattgctggcccagtttcgcccctcgccaggcatcgctgacgatcacccggccaatgacaaccgggtctgattcgttatcgcttttcagaatcctcgcatacgccaccagttcatcctgatgccagcccagaatatgccgattgtcgccgactaaatcatcgccatccacatccaggtaaggacagcgctgttctaccacaaagaccgcgcagcgcaatttgagtaacgcgtaaagttgaggaacggtaagttcgctatggtggagatcctgccagtcaatcatgatgcgctcctgtgttgtggtaatcttgggttaaacgataaccaaacgtgtatggacaagatggaattaattttttaggtacgtccgcaggcgttcccacgcgctcacgcaatgtaacggcaattttattacatctgcaacatccaacgcagccgggagtatggctttttgattgcggcgaagggacacagcatcaaatgcttaataccgcgtttcatcccggtaagcttgagcgcatttttatcagccatcttcacggcgatcatttgtttggcctgccgggtctgctatgcagccggtcgatggcggggaacccccatccgctaaccgtatacggacctcaaggcgtgcgtgagtttattgcaaccacactgcgtcttagcggttcatggaccgattttccgttgcaaattgaagaaattagcgcaggtgatattcttgacgacggtctgcgtaaagtgaccgcgttcaggctggagcatccactggagtgctacggatatcgcgttgttgaacatgacaagcctggcgcgctgaatgccagggcgttaaaagccgcaggcgttacgcccggcccgctgtttcaggcgttgaaggcaggaaaaaccgtcacgcttgccgatggaaggcagatcaatggcgccgactaccttgctcccgccgtggccgggaaatcagtggcgattttcggcgataccgcgccctgcgaggccgccctcgcgctggcgcagggtgtggatgtgatggttcatgaaaccacgctggatgcgtcaatggaggagaaagccaacgctcgcggacacagctccacccgtcaaaccgcgacgctggcgcgggaagctgccgttggtcggctaatcatgacccatattagctcacgctatgacgataaaggctgtcagcgcttactggcggaatgccgcgctattttcccggcgacggagctggcttacgatttttctgttttcccggtttagcgctccattttttgtcctcattgccgataacactaaaaaaggcaggctttcataatgaggttaggatggacaattttcagaaagatattgatgacagggccaatttaaccctgtccaaccgttttgaactgctgttattccgtcttggtacatcgctgcatgaacagaagtcagagctgttcggcatcaatgtatttaagctgcgcgaaatcgtaccaatgcccgcctttacgcgcccggcaggcatgaaagcgccgctattgggcatggtcaatattcgggatcaggtcattccggtgattgatttgccagcggtagcgggctgcaagccggaaaccgggctgaatattttgctgatcaccgaatatgcgcgcagcgtacaggcatttgccgtcgagtcggtggaaaatattatgcgtcttgactggcaacaggtgcataccgccgagaaagccgtcaacggtcgctacatcaccagtattgcctgcctggatgacaacaaagaaaccaacaacctggcgctggtgctcgacgttgagcagatcctttatgatattgtcccctccagccacgatctgcgcgccaccaatctgaagaccaataaattttatattaccccaggcgcggtagccattgtggcggaagactccaaagtcgcccgcgcgatgctggaaaaagggctgaacgcgatgggaattccgcatcagatgcatgtgaccggcaaggatgcctgggagagaatccagcaactggcgcaggaagcggaggccgaaggtaagccaattagcgagaaaatcgcgctggtcctgacagatcttgagatgccggagatggatggctttacgttaacgcgtaaaattaaaaccgatgaacggctgaaaaagatcccggtcgttatccactcctcgctttccggcagcgccaatgaagatcatatacgtaaggtgaaggccgacggctacgtggctaagtttgagattaacgaactctcttcggtcattcaggaagtgctggagcgcgcagcaacaaacagccagggaccactgatcagccgcaaaagcgcctgacgtaacaggggatgcctacagtacaggcatcccctgacgcttagtgagacaagccttccgccagttttaccagtttaataaactccgcgcgatagccttgtctatcttccccgcgcgcctgttcaccccatttaataatttgcggccaggtcgtatctgccagcgtttctgagccacgcagtttttgcccgaaagccgctaccgccgcgcggaaacgaaaatcttcagaggcgtcagcaaagatcggcatctttcccataacgaccgggaactcggctaatgtactttcgctgccctgcggcgctttccagcgcaatttgagccacgccagctcgcttgattttgttgtctttgaggcggctttgttctgagcgtagcgcagtttatccaccgaggctttctgcccgttaagcgtcagttcaaagaatagcgtgacgtgtttacccgcgccgatatcaccggcatcaaccttatcgttattgaaatcctcgtcgcgcagttggcgtttttcataaccaatctgccggtactcagtcacccactgcggattaaattcgatttgcgattttacatctttggcaacggtgaccagcgtttgatgcatctcatccttgaggactttttgcgcctcagagagggagtcgatgtagctgtaattgccgttacccacatcagcaattctcaccatcatggcttcgttgaaattgtcatcgccgacgcccagcgtagataaggtaatacctttctcgcgctctttttttaccagcgcttcgatgtctttgggatcggtaataccgaggttaaaatcaccgtcggtggtcaacaaaatgcggttaacgccgcctttgataaaccctttttcggcctgctcgtaggctagtcgtaatcccgcttcaccaccggtactcccgtaagcatccagattatcaattgccgctttaatcgcggttgtgttatttcccgctgtagacgccagcgcgacgtgagtgccgcccgcgtaggtcacaatcgtgatgttatcctgcgcacgcagatcgttcaccaacagttttagcgccgaccggatcaacggcaggcgttccgctggctgcatagagccggaagtatcaatgagaaaaaccaggttggcaggtggtagatctctggtctgcatgtcccgggcctgaacatcaacttttaatagcgtacgctgcgcgttccacggcgagggagccagttcgtatttaaccgcaaatggcatcggtatacaggccgcaatgggtttagtgttatcctgcttatccgcaacgggctgaggggcgggaaagtagttgagcatctcttctacccgcacggcttccggcggcggcagttgtccctgattcagaaagcgccgcacgttagcgtagctgccagtgtctacatccagactaaacgtggcgagcggcgcctgacttacctgtttaatcggattttcatcgtagtgttcgtaacgcgcggtccccattacattaccgccttgtgcagcgaacgcttttggtgccgcggcacgtgtctgcattacatattgcggtgcttcggctgttgccagagatgccgctttggcatctgccagggctttggcttcagcatattcggctgcttttttcgcagcctgttgggcggcctcggcttgtcttttctggacagtgtcatccccggcctgagcgctattttctttctggatagtccgcttctgttttaactcagccggattatttccctgcgggtcggagggctccggcccacagcccgagagaataaccccacccaacaacagcattaatgtttttccgttaagcatacaaattccttttcaattatattcgggtaattctctgcagatgtcctgcattatattccgcgttacttttattatcagcatgacgaaagtagaaaataattttacctgcgttaatagccaccaataataaaaaagataattatatttttgaggtaaataatatttacgtttaagatgaacggcttaatcagttgctggcgttcgacccacagattctgcgtgaagaacactatttacaggtgaccgatttaccaaaagtgaatatataagatgggggactatctgcactgtgccctcgccgatacttccttttacaacccaccaaacagcaatccattaagccgtgccgacactcacgttattgatggaaagatattatatgctgccgtcacatgaaataatgaactgagcgcgatcggacgccttgaaaaacgctgacagaaatacgcttcagatcaaatttttcccattgaagtcgatgagataaacatttatccgggaaacgggtcacgaaaacagttgggagagttgttccactgcctgatgcaagaaatggacaaactgctgagtttttatcagcgatgcctgagaaatgacagtcacgttataatttttatagcggagtaatgggccatatgtttaacacttcgacaattattgtgaattacccatatgaaaccgctggcgcttacggaaccgcccaacatccggctcttcgttcgtcgggacgtgttgggtttcggctacgcctcacccaacgagtctatggtctctatgcgtcacaggttttcataagttggatgcaatccaacatttagaggctcaggtattgctcatcagcctcaaccgccgataaatcggcggttattgacatcatcaacgcggcattacatcagcggcatcgccagttgcacaaggctaatcagcggctgcggccagacgcccagtaccaacaccagcaacgcggagatcagcaccacgataccgcctgcgctgtactgccagtttgtcggcgcgtcgcgtcccggttgctgcggcgcgtgcaggtagagactcaccgcaacacgcaggtagtagtacaaaccaatcgcggaacccactaccacggcggcgaccagccaccacaggctggcctgaacgccgaccgccagcacgtagaatttgccgataaagcccagcgtcatcgggatacctgccagcgacagcatcatcaccgtcatcaccgcggcaagaaccgggcggtgccagaatagaccacggtaagagtacagagaatccgcatccgggccgcggaacgggctggacatcaggctgaccacgccaaacgcgccgaggctgctgaacagataaccggccagataaacgcctaccgcttccatcgacatctcgccgctctgcagggcaatcagcgccaccagcagatagccgaggtgagagatagaagagtaaccgagcagacgtttgatgttggtctggctcagcgccatcaggttaccgaagatgatagaggcaaaggcgataatgcccagcaccacgcgtaccgcttcgctgtcgcctaccggcgcatacaggaacagacgcatcaccacgccgaagatagcgattttgctcgccgtcgccaggaaggtagaaaccggcacaggcgcgccctggtaaacgtctggcgtccacaggtggaacggcaccagagagagtttaaagcccagaccgacaatcatcaggccaaagcccgccagcagcaacggctcgtgcagcataccatcgccgaggctcttaccgagcgcttcgaaagacaggttgccggactgcgcatagaccagcgccatcccgaacagcaggaaagacgaggcggcggcggagaggatggtgtatttgatactggcttccagcgagcgtttctggcggaaagcataaccaatcaggccgaacagcggcagtgagatcagttcaataccgaggaacagcgccgccagatggttggcgttcgccagcagaattccgcccaggctggcgattaacaccagcaggtagaactcttcctggttatcgttatagccttccagccacgggtaggcaaaggtacaggtggcgaggctcgccagcagcaccagtccggtgtagagcatcgcaaagccgtcaacgcgcatcagcggcgtgacgtccattgccccggcctggccgacaaaccaaagcgaaaccagagcagcgttaagcccaatgaccgacagcgtggcattgaggaagtgattgcgtcgccacgcaatggagagcatcacaaccaccaccgtcaagccgacgatcagcagcggtagcagcgcaatcaggtgttgtggagttattgtcatggcgatttacggccttgtagtagtaacggaattaacaaaccactgctggatgttgctcatcgcagaatgcgaggtatccagaatcggctgcggatagaagccaagcagtaccagaagcaccaccagcaacagaatgataaacagctcgcgcagcgacatccctggcagttctacactggcaatctggctcttcgccttaccaaagtaagcgcgatgcagcatcgccagcgagtatacagaggcgaataccagcccaaaggtggagatcacggtaatcaccggcaccacctggtagctgccgaacagaatcataaattcgccgacaaagttaccggtgcccggcatcccgagcgtcgccaccgcaaagaacatggacagcgcaggcaaccatttcattttgccccacaggccgcccatcatacgcatgtcacgcgtatgcagacgttcgtacaactggccacacagaatgaacagacccgccgcggacaaaccgtgcgcaatcatctgaatcaccgcgccctggtacgccagctgactgccggtgtagatagcgatcagcacgaagcccatgtgggaaacggaggtataggcaatcaggcgcttgatgtcgtattgggtaaaggccatccacgcgccgtagaaaatgccgataacgccaagccacatagcgataggcgcaaactccgccgacgcgttcgggaacaatggcagggagaaacgcagcagaccgtaagcggcggttttcagcaagatccccgccaggtcgacggaaccggcggtcggcgcctgggagtgcgcatccggcagccagccatgcagcggaaccaccggcattttcaccgcgaaggcgatgaagaagcccagcatcagcagatattccacaccgtgggacatcggcgtattcagcagctcttcataattgaaggtccacacgccggtcgcgttgtagtgcacaaagaccagcgccaggatggcaatcaacatcaccagaccactcgcctgggtgtagatgaagaacttggtcgccgccgtgatacgcgttttcccgtcagaagctttgtggccccacagcgcgatcaggaagtacatcggcaccagcatcatttcccagaagaagaaaaacaggaacatgtcgatggccaggaacacgccgataacgccgcctaagatccacatcaggttcaggtggaagaagccctgatatttttcgatttctcgccaggagcaaagcaccgccagaacgccgagcaggccggtcagcaccaccattagcagcgacagtccgtcgagcgccagatggatagagatgccaaaacgcgggatccacggcaggacaaattcagattgccactgcggaataccggcggattgcgtcagtgaatagccgccctgcaaccacaattgcagaccgagcgccagcgtcagccccatggtaatcagcgctatccagcgcggcaccttcacgccaaagcgttcggtctgccagcacagaaagccgccgataaaggggattaatatcaaccagggtaataacatagctaagtatgtcccttatatttactcctgctcaggctatctcactcgtcagcccaaatcctgccagtgctcacacaaaacgcagcgcgttttgaacgtccgtaaggacggccccgtaggggtgagcttcgcgaatcatcctcacgtacttcagtacgctccggttgctgtgcgctggcggtatccggtctgacttcgccgatgacgcctgtacttcaggaacagattttcaacgaattctaaaaattatttttgggtttgtaggccggataagcactgcgccatccggcagtcgttcatccagccaacaaactcaacgcagtaccatcaacagtgccagcacaacgacagcgccgatgctcatggatgccacataccagcgcaaataaccgttctcgctcagtaccaggcctttgcctgcaaaacgggaaaggatagccggaatgttcatcaacgcattaagcgggtcgcgcttcagcagccaggcgataccgaggaatggcttgacgaatactttgtcgtacagccagtcaaagccccaggcgttataccaccaggtgcccagcagacggcccggcgcgctgttggcgatcgacgtcaccagcgtacgtttacccagccacagccatgcggcaatcagaatgccggcaatcgccactacgccagaggtaatttccagcgtcatgacgcgaccatgcgccagttcagttgtctgcggcagcaccccctgcagcggcggcacaatcagcgcgccaacaaaggtagacagaatcatcaggacaatcagcggcagatggtgggtaatccccttccctgcatgagcatgaatttgttctttaccgtggaatacgatgaaaatcatccggaaggtgtacagggaggtcatgaacgcgccgaccagacccgccaccatcagattgatatgaccgttcgccatcgccccggccagaatctcatccttactgaagaagcccgcagtgaccagcggcagcgccgacagcgccgcgccccccaccaggaagcaggcatacaccagcggaatggacttacgcagaccgcccatcttaaagatgttctgttcgtgatggcaggccagaatgacggaaccggacgccaggaacagcagcgctttgaagaacgcatgggtcatcagatggaaaatcgccgcatcccacgcctgtacgccaagcgccaggaacatgtagccaatctggctcatggtggaataggccagcacgcgtttgatgtcggtctgcaccagcgcggcgaaacctgccattaccagcgtaatcgccccgataatgcccaccagatgcagaatttccggggtcatcaggaacagaccatgggtacgagcgatcaggtagacaccggcggtcaccatggtggcggcgtggatcagcgcggagaccggcgtcggaccggccatcgcgtcggcaagccaggtctgcaacggtagctgcgcagatttaccgaccgcgccgcccagcagcatcagcgtcgcccacatcagcatgttgttgccgtcagcaaagtgcactggcgccagctcgaccatttcgcggaagttcagcgtgcccagttcgttgtagaggatgaacagcgcgaaggcgaggaatacgtcaccgacacgggtcaccacgaaggctttcattgccgccgcgccattcttcggatcgctgtaatagaagccgatcaacagataagagcacaggcccacgccttcccagccgaggtacatcaacagcaggttatcggacagcaccagaaccaccatgctggcgataaacaggttggtataagcgaagaagcgggagtagccctcttctccacgcatgtaccaggacgcgaacatgtggatcaggaagccgacgccggtgaccacagagagcatggtcagcgacaggccgtccagcaccaggttaaaaccgatgttaaagttaccgaccgacatccacgtccacagcggctggctgaacgcctgtttgccgttggcgaagaaatccatcccgacaaacgctgtcaccaacgccgccagaccaacggagcccacgccaatggtcgcggagagattttccgaccagcgtccgcgagagaacgccagcagtacaaagccaatcaatggcagaataatggttaaggcaagcatgttcatccacgcatctcacttactgaatcgatgttcaggttctggcgacggcgatggagttgcagcaacagcgcaagtccaatactcgcttccgcagccgcaaggctgatggcgagaatgtacatcacctgaccatcggtctggccccagtagctcccggcgaccacaaaggccagcgcggaggcgttaatcatgatttccagcccaatcagcataaacagcagattgcggcggataaccagaccggttaaacccaggacgaataaaatcgcagcgaggatcagtccgtgtgttaaggggatcatgcgcgctcctccgtttttcttttcgcgcggtcatcggcgcggttgcttagcacttcgcccgcacgctcttcacgaccgacgtggaacgccaccaccaggcctgccagcagcagcatagacgccagttcgaccgccagaacataaggcccgaacagcgtaatgcccaccgctttcgcgctaatcggcgtgccgtcgatgccctggtcgttaacgcccagaatggcgtacacaatgaccgccagcataatggccgacaaaaccgccggaccaatccacacctgcggcttcagccactggcgttcctgttcgatttcgctgccgccgaggttgagcatcatcaccacgaacacaaacagcaccatgatggcgcctgcgtagacgataatttccagcgcaccggcaaagtaagcgcccagcgaaaagaacaccccggaaatcgccagtagcgatatcaccagatacaacagcgcgtgtaccggattggtatgggtgatcactcgcagggtcgcgaggatggctatcaggccacagatataaaaagcgaattccattgccctctccttacggtaacaggctcttgacgtcgataggcttggcttcgttctctgcttcgcctttatctttgccgtcgattgccatacccgccatccggtagaagttatattccgggtatttgcccggaccggaaatcagcagatcctctttttcgtacaccagatcctgacgtttgtattcgcccagttcgaagtccggggtcaactgaatcgccgtggtcgggcacgcttcttcgcacaggccgcagaagatgcagcgtgagaagttaatgcggaaaaattccggataccagcggccatctttggtctccgctttttgcagagagatacagcctaccggacaggctaccgcgcacaggttacaggcaacgcagcgctcttcaccgtccgggtcgcgcgtgagcacgatacgaccacggtaacggggcggtaaatagaccggctcttccggatacatccgcgtttcgcgtttggcgaacgcatgcaggccgatcatccagatactgcgtacctgagtgccgaaacctactaataattcttttaaggtcatggtctttgtgtcccttattgcgcctgccacagaatgacagccgccgttaccagcaagttgatgagcgtcagcggcaggcaaactttccagccgaaggacattacctggtcataacgcggacgcggtaacgacgcacgaatcaaaatgaacatcatcatgaagaacgcggttttcagcgcgaaccagacgaatggcggtaagaacgggccatgccagccaccgaagaacagcgttaccatcagcgcggaaacggtgacgatgccgatgtactcccccacgaagaacagaccgaatttcatcccggaatattcgatgtggtaaccgtccgccagttcctgctcggcttccggctggtcaaacgggtgacggtgacagaccgctacgcccgcgatggcgaaagtaacaaacccaaagaattgcggaatcacgttccacagatgcgcctggttattgacgatatcggtcatattaaatgaaccggcctgcgccaccacgcccatcagggaaagaccaagaaacacttcgtagctcaccgtctgggcagacgcgcgcatcgcgcccagcagcgagtatttgttgttgctcgaccaaccggcgaacagcaccgcgtaaaccgccagaccggccatcatcaggaagaacaaaatcccgatgtttaaatcggccaccacccaattagggctaaccggcacaatggcgaaggagagcagcagcgaagtaaacgcgatcatcggcgccagggtaaagatgacgcgatccgagaatttcgggatccagtcttctttaaagaacatcttgatcatatccgcgaccagctggagcgagccgccccagccaacgcggtttggtccataacggttctggaacagacccagcagacgacgttcgccaaagctcatgaaggccccgcaggtgacgaccaccagcagaatcaccaccgctttgagaatgctcagcaggatctcaatcagatccggtgtaatccaactcattgttgcgcctcccgcagatcctcaagacgcgcgccagccagaaccggcgcgatgccaggcatacccatcggcagccctacctgccctgccgctaacccttcagagatttcaaccggcagcgtcaccgtattgccatcgtagctaaaggagacgcgcgtcccggcattgacgcccaacttcgcggcatccgccgggttaagtttgatatacggctgcggcatacggctctggaagaccggagaacgctgagacaattcgtcgctgccaaacaggtggtaatacggcgcaatacgccactgaccgtcctgcgcctggaagcttgccggcacggtagtgaaataatccagaccgccctcagtcgcttcaatcaaacgcacgcccggatcgccgtgacgcagtttgccgcccacttcatcctggaatttgttccacgcctgcggggagttccagcccggcgcccaggcgaacggaatttcagatcgcggggcagtcggttggttattcccttccattgagaaggcgaacatggtgtctttatcctgcggctgacgtggttcatgcacgctgatattggcgcgcatcgccgtacgaccgctgtaacgatgcggttcgcgcgccagcttctgcccacgaatgcggaaggtcgcatccggcgcggcgtccttaatgccggcaaattgcggcatggcggcaatgaccgcgtcgatcacgtggtcaagctgagtccagtccacttcgcggttttcgacggtgctgtgcagtgaatgcagccagcgccagctttccagcataatcgtcttgttatcgtagtaggccggatcataaacctggaagaagcgctgcgcgcggccttcgttgttgatgaccgtaccatcgctttcggcgaagcttgccgcggaaagcaccagatgcgcgttttccataatcgccgtgcgctgatggtcaaccaccatcaccagcggcgctttggcgagcgcagcgttcacgcgcgtagcgcttgcatgacggtggagatcgttttccagcaccaccacggcgtccgcgctgccggtttccagctcgcccaacgcatcatcaagcgaaccgccgcccatcatacccagccccatgctgttcacggagcgggcaatcatagtaataccgacgtcggcgccacggcctttcagcgctttcgccacgttggcggccgcctgaatcacctcactgctaccggcgttagtgccggagataatcagcggttttttcgcgccggccaacgcctgcacaatgacatcaattttgttttgtaagtcgctgtcgataccgtcaaccgcaggcgctgtattgtccagcgcatgagcaatcgcaaagcccaggcgcgcctgatcttccaccggcgcgcgataggtccaggcggcgatatcatccagacgggtgtcatccacgttggtcacgaacagcggatgtttggcacgctggccgatgttaaggatggccgcaatctgccagtcggccactttctgcgccgccgccatttcacgcgctttacctttcaccgcctggcgtaccgccagcgcaacgcgcgcgccggtctgagtgacatcctcacccaagaccagtaccgcgtcataagattcgatctcccgcagcgccggggtgtaaattccgccttcacgcagcactttcagcgccagttgcagacgttcctgctcgccgcgcgcgataccggtgtagaagttttccgcaccaaccagctcacgcagcgcaaagttgctctcaatgctggcgcgtggcgaaccgataccgatcactttcttcgactggcgcagaatatccgccgcgccctgcatcgcctgctcggcgttgagggtgatgaagtcatcgccacggcgctgaaccggctgacgcggacggtctttcaggttcacatagccatagccgaaacgaccgcggtcgcagaggaagtagtggttaacggtaccgttgtaacggttttcgatacggcgtaattcgccatagcgctcgcccgggctgatgttacagccgatggaacactgctgacagatgctcggcgcaaactgcatgtcccatttacggttgtaacgctcggagtgcgttttatcggtgaagacgccggtcgggcaaatctcgaccaggttaccggagaattcgctttccagcgtaccgtcttccggacgcccgaagtagacgttgtcatgcgcgccatagacgcccagatcggtgccgtcggcataatctttgtagtaacgcacacaacggtagcaggcgatgcagcggttcatttcgtgcgagatgaacggccccagatcctggttgcggtgggtacgtttggtgaaacggtagcgacggaaactgtgccccgtcatcacggtcatatcctgaagatggcagttaccgccctcttcacagaccggacagtcgtgcgggtggttagtcatcagccactccaccacgctttcacggaactgtttcgcttcttcgtcgtcaatagagataaaggtaccgtcggtggctggcgtcatacaggacatcaccaggcgaccacgcgtatcttccgcgttttggtattgcttcaccgcacactggcggcaagcaccgacgcttcccagcgccgggtgccagcaaaaatacggaatatcaaggccgagggacagacatgcctgtagcaggttgtccgcgccattgacctcgtattctttgccgtctacatgaatcgtagccattagcatgcttccaaattaaaaatcgttaactcaccagcgctctttgagcaggttcggctgaataccattgattaaatgggtattactgaacggctgcttgatgccagcttcgaattcttcgcggaaatacttaattgcgctttgcagtggctcaaccgcgcccggcgcatgcgcgcagaaggttttacccggtccgaggaaacgacacagttgctcaagtgtctcgatatcccccggctggccttcgccacgctccagcgcgcgcagaattttcacgctccacggcagcccgtcgcggcatggcgtacaccagccgcaggattcgcgggcaaagaactcttccaggttacgcaccagcgacaccatgccgatttcgtggtctaccgccatcgccagcgcggtgcccagacggctgcctgctttaccgatgctttcgaactccatcggcaggtcaagatgcgcctcggtcaggaagtcggttcccgccccgcccggctgccaggctttgaatttcaggccatcgcgcataccgccggcgtagtcttcgaggatctcgcgcgcggtggtgccgaacggtaattcccacaggcccggattcttcacgcggcccgagaagcccatcagcttggtacccgcatctttgcttttcgagatgttctggtaccactccacgccgttggcgaggattgccgggacgttacacaacgtttcgacgttattcacacaggtcggcttgccccatacgccggaggtcgccgggaaaggcggcttggagcgcgggttcgcacggcggccttcgagggagttaatcagcgccgtttcttcaccacagatgtaacgccctgccccggtgtggacaaacagttcaaagtcgaacccggtgcccatgatatttttgccaagcagcccggcctcggttgcttcggcaatcgcacggcgcagatgtacagccgcttcgatatattcgccgcgcaggaagatgtaaccacgatacgctttcagcgcgaacgcggagatcaacataccttccaccagcaggtgcggcagttgttccatcagcagacggtctttataggtgcccggttccatttcatcggcgttacacagcaggtaacggatgttcatggattcatctttcggcatcaggctccacttcagaccggtggaaaagcccgcgccgccgcgccctttcagaccggcgtcttttacctggctgacgatttcatccggagacaggccggtcagcgccttacgcgcgccttcgtagccgtttttgctacgatattcatccagccagaccggctgtttgtcatcgcgcagacgccaggtcagcggatgggtttcgggagtacggataacgtttttcatttataccgctccagtagttcaggaatggcttccggggtcagatggctgtgagtatcctcatcaatcatcatgttcggccctttatcgcaattccccaggcagcaggtcggcagcagcgtaaagcgaccatcaaaggtcgtctgccccggtttgatgttgagatttttttccagcgcggcctgaatcccctgatagccggtgatatggcacaccacgctgtcgcagtagcgaatcacgtggcgaccgaccggctgacggaagatctggctgtagaatgtggcgacgccttcgacgtcgctcgccggaatacccagcacatcggcaatagcgtagatcgcgccgtccggcacccagccacgctgcttctgaacaattttcagcgcttcaatggacgccgcacgcgggtcttcgtagtggtgcttctcgtgctctatcgcttcacgctctgccgcactcagctcaaaagcctcggtttgtggttgttgattctcgtgcataattagcggtccacatctgacataacaaaatcgatactacccagatagacaatcaggtcggagaccaggctaccgcggatcgccgagggaatctgctgcaagtgcgcaaagctcggcgtgcgcacgcgggtacggtagctcatagtgctgccgtcgctggtcaggtagtaactgttaatccccttcgtcgcttccaccatctggaaggactcctgcgccggcatcaccgggccccaggagacctgcaggaagtgggtgatcagggtttcgatatgttgcagcgtgcgctctttcggcggcggcgtggtcagcgggtgatccgctttgaacgggccttccggcatgttatcgaggcactgctgaagaatgcgcagactctggcgcagctcttccactttcagcatcacgcgggtatagcagtcggaaacgccgccacccaccggcacttcaaagtcaaagttttcgtagccagagtatggacgccatttacgtacgtcgaagtcgatcccggtcgcgcgcagccctgcgccggtggtgccccactccagcgcctctttcgcgccgtaagcggcaacgccctgcgaacgccctttcagaatagtgttacgcagcgcggctttctcgtaagaatccagacgcttcggcatccactcaaggaactctcgcagcaggcgatcccaaccgcgcggcaagtcgtgcgcgacgccgccgatacggaaccaggccgggtgcatacggaaaccggtaatggcttccaccaggtcataaattttctgccggtcggtaaaggcaaagaagaccggcgtcatcgcgccgacgtcctgaataaaggtcgagatgtacagcagatgactgttaatgcggaacagttcggagagcatcacgcggatgacgttcacacgatccgggacggtgatccctgccaacttttctaccgccagcacgtacggcatttcattgacgcaaccaccgaggtattcgatacggtcggtatagggaatgtagctatgccaggactggcgctcgcccattttttcggcgccgcggtggtgatagccgatatccggcacgcagtcgacgatttcttcaccgtcaagttgcaggataatacgaaacgcaccgtgcgcagacgggtggttcgggccgaggttgaggaacataaagtcctcgttgtcagtcccgcgcttcatcccccagtcttccggcttaaaggtcagcgcttccatttccagatcctgcttggctttggtcagctcaaacgggtcgaattcggtcgcgcgcgccggataatctttacgcagcggatggccttcccaggtttgcggcatcatgatgcgcgtcaggtgcgggtggccttcgatatcaataccaaacatctcccaggtctcacgctcgtaccagttggcgttagggaaaagtttagtgaaggtcggcacgcgcaggtcgttttcagacaacgccaccttgagcatgatatcgcgattacgctcaatggaaatcaggtggtagaaaacggaaaaatccgcggcgggtaacccgtcacggtgcgtacgcaggcgttcatccatgccgtgtaagtcaaacagcatgacgtaaggtttcggcagtttctttaagaaatcgccaacctccagtagttgttcacgcttgacccaaacaacggggataccggtgcgggtcgcctgaacggtaaaggcatccggcccaaaacggttgcgcagttcgccgataaccggatcatcaagatgatcgcgggtactccatgcagcgtcttgcgcggttaagtcggtcatattgttcaccattgcaaatggtccgtggtggtcggcagtgcttcgcgctattaaaatagtggttagcgaagtgaagtgctgctgccgacaggcgcaaattaaatctcgtccggggtacgcaggttcgtgacggcaatacgctcgccgcgtttacgttcgcgttctggctgcatattggcgcgatacacgccctgatcgcccaccacccatgagagcggacggcgctctttgccaatcgattcttgcagcagcatcaacgcctgcatatacgcttccggacgcggcggacagccagggatatacacatccaccgggatgaacttatcaacgccctgcactaccgaataaatatcgtacatgccgccggagttggcgcaggcgcccatagaaatgacccattttggctccagcatttggtcatacagacgctgaataaccggggccattttggtaaagcaggtaccggccaccaccatcaggtcagcctgacgtggcgacgcacgcagcacttccgcgccgaaacgggcaacgtcatgcactgcggtaaaagaggtcaccatctctacatagcagcaagaaaggccgaagttgtagggccaaattgagtttttacggccccagttaaccatgtcatgcagtttgcccatgaacacgtttttgttaacttcctgctccagggggtcggttacgatctcctgtttttgcagggggtaacggtcattctcaccgttaggatctatgcgggtgagcgtataatccatcttaatgcctcgcggttagcgttgacgattagcgatactgttcgtttccgggttcatacgctcgcggcgtgaacgcgcgggcgtccagtccaacgcgccaatacgcgccagataaaccagaccagccagtaacacaaaaataaaaattgcagcttccacaaagccaacccagccgctttcgcggatagaagtcgaccatgcgaacagatacagcgcttcaacgtcgaagataacgaagaacatggctaccaggtaaaacttggcagacaggcgtaagcgggcggtgccgaccgaatcgatacctgattcaaacggaacgttcttgtgcctcgcgcgtgcgcgaccgcccaaaaaccaaccgcctaccagcatcaggcagcacaggccaatggcaacgataagaaagatagcgaatgcccagtgatgagcgatgacttcagtggatgttgacatactcattgcttactcatcaaaagtagcgccagtttctctgctctttacggcagatgggcgccacatcgattcatggggaggaataaaaaaaaccctacaattactgtagaaaatgataaaaacagctaattgatgtggttttttactcctttctataaccttttgtcaactttaacaaaagttccttcacattaatttacatcaattcatcaccattaacattaagtgccatcctggagaaaatgactcttcgaccaggggggattttatgttgttgaatcgtgtccgttgtgaagcaaaagaaataacacacacctattttgacaggaatttgtgaagatgcctccccctaaatgggagtattttcttgatctgtgacacgcttttgttaattcaccccctaaaacagcaacaatttctctagttttttaacatgcaaattcataaaatggatgttctggttattttttgcccacattgaactgcgaatcgctactggctgatttaccgcaacttttacaatttgtgcggttaagcgcgtacagatgggcacaaaaaaagagccactgagcgttttttcatcgccagcggctcttttttacatttacgacttagcgccttttgcctgcgagctactcaaaacccccttccaccatcagcggatcatctccgccctctgcagaaaactggttgtaatgccatgggttttggtagctttccatcgcatggaaaatcaccatcgccagctcgttctggctattgggatcgcggcacaacagatattccgtatccggcaaaggcggtaatccgtctgcggcgcccagcacgcgaaggtcgggactcatcatttcgacaggtcgagccgttacgccaagaccggctttaacggccgcgcgtaccgccggtaatgtagacgccacataggccagccgccagggaatacccgctgcatttagcgtctccagcaccatatcgcggaatgggctgggatcgtccagcaggactagtggtacgggctctcccctttgcaaaacatactcagccgcacaataccaatgggtgggcgaggtccgcaaattcagacagtccagcgaatgaggttggttagtcgtcaccaccaaatctacttcctgcgatttaaccatgtccaccatataggcgttgcgttttacccgtacatcaagcgcgagtttcggataaaccgagctgattcggctaagcaaaaaaggcaggatagtatcagctgattcatcagaagcgccgattgttaacactccctgaagattactgaacattaatgatgaacacgcctcatcattaaaacgcaggatttttctggcgtaccccagaagctggataccgtgttcggtcaaaagtttgttacggccatggcgggcgaacaattcctttcccacgagttgctcaagacgctgcatttgctgactgaccgcagactgagtacgacataccgccgccgccgccgcggcgaaggtgttcagatcggcaacggccacgaacgttctcagcagatcgagatcgaggttaattatcggacgatttgcatttatcataatttttcacttactggcgggtcatatcgggctgacctggttaatgctgtgcattcagaaacaagcaattccatttgtaatgtgcatccttcgcagtaccgcctggttacccaggtaaatgttagaatgtaattgaaaatacgaccaaaacacttctcttacttactgatataataccaaatgcaactgatcgggatatatcaaagagaatgtgtcatacctttaggcgtctacagatttctgctaatgatggacgtgtaaatcttgtaacagcgtcaaatagtttaccgagacgcacagatacaaaaacaatatattgaacaataggttatgtataaaatcgcgtcatgataattagcagacaacgcagactacgcccccgtttcggatcattatcttaacctaaaaccgctatatttataagtattattacgaataatcttaacctgggatatgttatactaatcggaccagaaagatattattacgactttagtaaatgctttttaaatattaaataataattaattaagatttctaccattcattaattatacttaacaatagtttcacaccccccgccgccggaaaggtctaaccttctcattttacctttaatactcagtatttccgaaatagccgacgcgacactaatgatgaatgcttatctctcataaaacagataatttatgacaacataaaaaaccacattacgcgcaatcatatagaacaaaacaccatacatacagaaaaaaatagaaaatacatctaactaaatgattttatgaagttttaaacagttcgaaagcgcgttaaaaataaacaaaatcttcttctgttcactcttcaaaactcaccgtcgtgggagtacattgtttcgtgctgacttccacggcagggagtggcaataacagctaaaaggtcaagattcatgtcccccattgaaaaatccagcaaactcgaaaatgtctgttatgacattcgtggccccgttctgaaagaagcgaaacgccttgaggaagaaggtaataaagttcttaaactgaatatcggcaaccccgcccccttcggattcgaagcgccggacgaaattctggtcgatgtcattcgtaatttgccgacggcgcaaggatattgcgactcgaaagggctttattccgcccgtaaagcgattatgcagcattatcaggcccgtggaatgcgcgatgtaaccgtggaagatatctatatcggtaacggcgtttccgagctgatcgttcaggcgatgcaggcgttgcttaacagtggcgatgaaatgctggttcccgcgcccgattatccgttatggacagcggcggtatcgctctccagcggcaaggcggtacattatctttgcgatgaatcttccgactggttcccggaccttgacgatatccgcgccaaaatcaccccacgtacgcgtggtattgtcattattaatccaaacaaccctactggcgccgtctattctaaagaattgttgatggaaattgtcaacattgcgcgcgagcataatctcatcatcttcgccgatgaaatttatgacaagattctctatgacgatgccgagcatcactctatcgccgcactggcgcctgatctgctgaccatcacctttaatgggttgtctaaaacctatcgcgtcgccggcttccgccagggctggatggtgctgaacgggccgaaaaaacatgcgaaaggctatattgaagggctggagatgttagcctcaatgcgcctgtgcgccaacgtcccggcgcaacatgctattcagaccgcgctcggcggctatcaaagcattagtgaatttattctgccgggcggtcgactgtatgaacagcgtaaccgcgcctgggagttgattaacgatattcccggcgtttcctgcgtaaaaccgcgcggcgcgttgtacatgttccccaggatcgacgctaaacgttttaatattcacgacgaccagaagatggtgctggacttcctgctacaggaaaaggtgctgctggtgcaaggtaccgcctttaactggccgtggccagatcacttccgcattgtgacgctaccgcgtgaagatgacctggagatggccatcaaccgttttgggcgtttcctctcaggttaccatcaataatcttaaattcaggctacttcggtagcctgaattgcatcttcatctccctccccgcacaatgaagtctgccgcagtgaaaacaaaaggtaatctatgaagcagagccattttttcgcccatctctcccgcatgaagttgattaaccgctggccgctgatgcgtaacgtgcgtacagaaaacgtctccgaacatagtctgcaggtggcgatggtcgcccatgcgttggcggcgataaaaaaccgtaaatttggcggtcagctcaatgctgaacgcatcgcgcttctggcgatgtatcatgatgcctcggaagtactgaccggcgatctgccgacgccggtaaaatattttaattcccagatagcccaggaatataaagcgatcgaaaaaatcgcccagcaaaagctggttgatatggcgccggatgaattacgcgatattttcgcaccgcttattgatgagaatgcctggagcgaagaagaacaggcaatcgtaaaacaggccgatgcgctttgcgcctacctgaaatgcctggaggagctctcagcgggaaacaatgagtttggactggcaaaaacgcggctggaaaaaacgctggaattacgtcgcagccaggagatggactattttatggcggtattcgtaccaagtttccatctttctcttgacgagataagccaggattcaccgctttagttgccggatggcggctaacgccttatccggcctaccgttcttcccgtaggcctgataagcgtagcgccatcaggccttttcctgtctggggttaaaacggaaacaacattggaatcatcacaatacaaaccgccatcacaataagcgtgaacggcacgccaagcttcacaaaatcgctaaagctatagtttcccggccccagaaccagagtattgaccggcgatgaaaccggcgtcataaaggcggcggatgccgccatcgccaccgccatcgcaaacggatagggcgacacccccatcgatttcgccgccgccagcgcaatcggcgccatcagcaccgccgttgccgtgttagaaatgaacagtcctatgacggcacacagcacgaacaggcatcccagcatcatatacggcccatagccgccgccgatatccattaatccttgcacgaccagagagacgccgccggttttttgcaacgccagcgcaaacggcatcatacccacaatcaagataatactcggccagtggatcgctttatacgcgctttcagcatcaatacagcgaaatttccccatcagcaggcaggcgataatcgccgcgatcgggttgggaatttcatcggtcaacatcagcgccaccatcagtaccaggcagaaaatggcgtgcggcgcctggctgtgcgcaggagaggcttcgctgacctcgaccggcatattcagcaccacaaagtcgcggcctttttgccccagcaggctgattaacttccagttccccacaaccagaatgatatcgcccatcaataacggttcatcggccagcgatccttccagcgcgacgccgtcgcgtttcaggccgaccacattcagcccgtaacgtgtacggaaggcgatttcacgcaccgacttgcctatcagttcagactccggaataagcgaaatttccgccatgccaacatccaacgcctgatcggaaaaatattctccacgcaataccatcggttccagcagttgctcggcgcagaactctctgaggtcaacctccgccgccgacatatcaatcagcagaacgtcgcgagcgcgaaactccgatacgccgttcacattgacgataacccgccgaaagcgccgccagcgttcaacgccgatgacattggcgccgtaacgttcgcgcagtttaaggtcgtccagccgctgtcccaccatcggcgaaccggggcgaatcgccagacgacgagcgcgccccgtcagacggtactcgcggataagatcgcggaaagtgcgacgcttaccggcctgttgtccgggcgcatcgccttttagcatgaagcgcatcaccagcatataaacaatgccgagcgccaacaccactacccccagcggcgtcacgctaaaaaagttgaacccgtgcaggccttcacgcagcagttcactgttaaccaccaggttcggcggcgtcgccaccagcgtcatcattccgctgataagcccggcaaaactcagcggcatcatcaggcgcgaaggcgaggtctgcatatgcatagaaacgctaagaacaacggggataaagatcgccaccacgccggttgaactcatgaaagcgccaagtccggcgacggtgatcatcagtaaaaccagcatcttgatttcactgctgcccgccattttaaccagccaggtaccgaccaccgtcgcaacgccggtgcgcacgaggccgtcgccaataataaataaggcggcgataagaatgacattcggatcgctaaagccggagaaggcttccggaagggtcaaggtaccgctaaggacaaaagcaacaatgacgaataaagccaccgcatccatacgtactttgcccgtcgcaaacaacacgacggcaatcgccagtaaagagagaacccaaatcaattcaccgttcacaacatatccttgtcagatgagaagataacgcgattctgccataaatatgccccgccaaagcggggcgatatcatgatcaggtctttcttaacaccaccacatcgccgtttggttgtttagcgaccgataattgcgtcaggctatccaacgcaaaatcaacatccgccagacgcggcgtgtcggccggcgcattgaccgcaatgacgtggcagcccgcagccagcccggacagcacgccagccggggcatcttctactacgacgcactcctgaggggccaggccaagcagttgtgcgcccagcaaatacgcatccggctccggtttgccgcgtttgactcgttcggcggtgacaaacacctctggcgctggaaggcccgcgacctgatggcgcgcacgcgcgaccggcattgaaccggaggtgacgatagcccacggaatgcccactttattcaggtgattgagtaaatcgactgcccccggcagcgcggtgatccctgcggtttcagtggcttctatttgctccaggcgcgtaaactcagcggcaatttccgcctccgatttacccgccataaaatgccgcaacgaggtgatcgcctgtttgccatgaataaagcccagcacctcatcatgagcaaggttaaaacgatcggcccagctacaccacgcgcgttcaacggcaggtaatgagtcaaccaacgttccatccagatcaaacagaaaacctttacactgcacgcgagcctcctcaggcattaatgatttgattgatttcattcgcgctcaggtggtactgacgcgggcaggcatgccagacattcaacatccgctggtatttttcccacatcggcgtctgggcattaaagccgtgtgtcccggcgtcaaagtgagtgtagcgtccttctatattcaccataaaacggacatagccgaggtagcgcgcttctgtcgcggcgtcaaaccccaggaaggtgacgcgacgttcgtcgatggcttgcgtatctttgaggttggtccaggagacgtgcagcgcatggtacatctccataatatcgatgatggtacgacaggtctcttccgtcagctcgccaaactcgcgatccagctcgcgcatctgcaggccgtagccgcgttcaataattgtttgtaagcgacggtaacgctcggcgttggtgggatcgagcatcgtcatcattttgtactggttagacaaaatcagacgttgcgcgttggtcatttccattttgaactcctgtatcacgctatggcgatgaaaaaaagaaggcattggtatgccttcttttatatgcgtaatccggggtcaattacaaatcatccaggaaagttttatccagttgtttgaaggcgcgcttaagcgtgtcagctaatgcctggtaatccggctttccttctaccggcgccagcgcttgtccagcctcctgcaatttaccgcgaacttcgtaaaaccagttaaggattgaaggcggcaacggcgtcacggaacgtttccctaaccaccataatccctgcatgggcaagctcagggcgaacagggcggtcgccacggccggacctaactgaccgcccagcgctatctgccagcataatgtaaagacggcgacaggcggcataaatcgtatggcatagcgcgtcatacgaatgacgcggttttcgacgaaaacgggcgccagccgtttttccatcggccacgtcttcgcgtagtgctgcccccggcgaaataagctaaaaaaatttacggagcgattatccggtgtcgacatggcctacctcaacttcacatataaaatttaaaaaatttgtgcaaaacaacaactgcgagggacaacgttcaaaacattttgtcttcgatacccactatcaggtatcctgtgtcggcctgtcaaaggccggtagtttaaaatcattgagtcgtcaatattacacatagtatgccattggctgaaaaatacgcaaaatggcatagactcaaaggtatttcttccatcatgcccaaaaaaactcctgcgcatgatgttaatcataaatgtcagggctatcatgcgctacgctctatggctcactgacgtttttttagccacgtatcataaataggtacttccatgtcgagtaagttagtactggttctgaactgcggtagttcttcactgaaatttgcaattattgatgcagttaatggtgatgaatacctttctggtttagccgaatgtttccatctgccagaagcacgcatcaaatggaaaatggacggcagtaaacaagaagcggctttaggtgcaggcgccgctcacagtgaagcgctgaactttatcgttaacactattctggcacaaaaaccagaactgtctgcgcagttaactgcaattggtcaccgtatcgtacacggcggcgagaagtataccagctccgtagtcattgatgagtccgtcattcagggcatcaaagattccgcctctttcgcaccgctgcataacccggctcacctgattggtatcgccgaagcgctgaaatctttcccgcagctgaaagataaaaacgttgcagtattcgacaccgccttccatcagaccatgccggaagaatcttacctgtatgccctgccgtacagcctgtataaagaacacggcgttcgtcgctatggcgcacacggcaccagccacttctatgtaactcaggaagcggcaaaaatgctgaacaagccggtagaagaactgaacattatcacctgccacctgggcaacggcggttctgtttccgctatccgtaacggtaaatgcgtggatacctctatgggtctgaccccgctggaaggcctggtcatgggtacccgttccggcgatatcgaccctgcgattatcttccacctgcacgacactctgggcatgagcgtggatcagatcaacaaaatgctgaccaaagagtccggtctgctgggtctgactgaagtgaccagcgactgccgttatgttgaagacaactacgccaccaaagaagacgctaaacgtgcgatggacgtttactgccaccgcctggcgaaatacatcggttcttacaccgctctgatggacggtcgtctggatgcagtcgtgttcaccggcggtatcggtgaaaacgccgcgatggttcgcgagctgtctctgggtaaactgggcgtgctgggctttgaagtcgaccacgaacgtaacctggcggcccgcttcggcaaatctggtttcatcaacaaagaaggtacccgtccggcggtggtgatcccaaccaacgaagaactggttatcgcgcaagacgcgagccgtctgactgcctgatttcacaccgccagcctcgctggcggtgctgttttgtaacccgtccccaaaagacggtaacgaaagaggataaaccgtgtcccgtattattatgctgatccctaccggaaccagcgtcggcctgaccagcgtcagcctcggcgtcatccgtgctatggaacgcaaaggcgttcgtctgagcgtctttaagcctatcgcccagcctcgcgctggcggcgatgcgcctgaccagaccaccactatcgttcgcgcgaactctaccctgccggcggctgaaccgctgaagatgagccacgttgaatctctgctctccagcaaccagaaagacgtgctgatggaagagatcatcgcgaactaccatgcgaataccaaagacgcggaagtggtgctggttgaaggtctggttccgacccgtaaacatcagttcgctcagtctctgaactatgaaatcgcgaaaacgctgaatgcggaaatcgtttttgtcatgtctcagggtaccgacacgccagaacagctgaacgagcgtatcgaactgacgcgcagcagcttcggcggcgcgaaaaacaccaacatcaccggtgttattatcaacaaactgaatgcgccggttgatgaacaaggccgtactcgcccggatctgtcggagatctttgacgactcttccaaagcgcaggtgatcaaaatcgatcctgctaaactgcaggaatccagcccgctgccggttctgggcgcggtgccgtggagcttcgacctgattgcgacccgcgctatcgatatggcgcgtcacctgaacgccaccatcattaacgaaggcgatatcaaaacccgccgcgttaaatccgtcactttctgcgcgcgtagtattccgcatatgctggaacatttccgcgcaggctcgttgttagtgacctccgctgaccgtccggacgtactggtcgcagcttgcctggccgcgatgaacggcgtagaaatcggcgccctgttgctgaccggcggctatgaaatggacgcgcgcatttctaaactgtgcgaacgcgcattcgccaccggtctgccggtctttatggtgaacaccaacacctggcagacttcgctgagcctgcaaagcttcaatctggaagtcccggttgatgaccatgagcgcatcgagaaagttcaggaatacgtcgcgaactacgttaacgctgagtggatcgagtcgctgaccgccacttccgagcgtagccgtcgtctctctccgccggcgttccgctaccaactgactgagctggcgcgtaaagccggtaaacgcgtagtgctgccggaaggcgacgaaccgcgtaccgtcaaagcggcggcaatctgcgctgaacgcggcatcgccacttgcgtactgctgggcaacccggatgaaatcaaccgcgtcgcggcatctcagggcgttgagctgggcgcaggtattgaaatcgtcgatccggaagtggtgcgtgaaagctatgtcgctcgcctggttgagctgcgtaagagcaaaggcatgaccgaaccggttgcccgcgaacagctggaagacaacgtggtgctcggcacgctgatgctggagcaagacgaagtcgacggcctggtttccggcgcggttcataccaccgccaacaccatccgtccgccgctgcagcttattaaaacggcgccgggtagctccctggtctcttctgtgttctttatgctactgccggaacaggtttacgtttacggcgactgcgcaatcaacccagacccgaccgcagagcagctggcagaaatcgcgattcagtctgcggattccgccattgccttcggcatcgaaccgcgtgtggcaatgctctcctactccaccggcacctctggcgcgggcagcgacgtagagaaagtacgtgaagcgacgcgtctggcgcaggaaaaacgtcctgacctgatgatcgacggtccgttgcagtacgacgccgcggtcatggctgacgtagcgaaatccaaagcgccgaactcgccggttgcgggtcgcgctaccgtgttcattttcccggatctgaacaccggtaacaccacctacaaagcggtacagcgttctgccgacctgatctccatcgggccgatgttgcagggtatgcgcaagccggtgaacgacctgtcccgtggcgcgctggttgacgatatcgtctacaccatcgccctgacggcgatccaggcttctcagcagcagcagtaacagtaaaagctaatgccggatggcggcgtgaacgccttgtccggcctacaggtgagataccgttgtaggccggataagacgcgttagcatcgccatccggcattctgctatttaccctgcaaagcggaattttttgcttaactgcgctgcatcaatgaataactattcccttcttctcatacttagcctctttgctttgcaacagggatagtctgtcatgtctgtcgttacagaatcaaaaacagccagaaaatgggcaatgcccgatacgctggtcatcatcttttttgtcgccattttaaccagtatcgccacctgggtcgtccccgttgggatgtttgatagccaggaagtgcagtatcaggtcgatggtcagacaaaaacccgcaaagtcgtcgacccgcactcttttcgcattgtgaccaacgaggccggggaagcgcagtatcatcgagtacaatttttcactaccggcgatgaaagaccagggctgatgaattttccgtttgaagggttaacatccggatcgaaattcggcactgccgtcggcatcattatgtttatgttggtgattggcggcgcattcggcatcgtgatgcgtaccggcaccgtggataacggcattctggcgcttattcgccacacgcggggcaacgaagtcctgtttattccggtgctatttgtcctcttttcgttagggggcgccgtatttggcatgggcgaagaggcggtcgcctttgcaattatcatagccccgctgatggtcaggctgggctatgacagcattaccaccgtcctggtgacctatatcgccacccaaattggctttgccagttcgtggatgaacccgttttgcgtagtcgtcgcccaggggattgccggcgtgccggtactttccggctccgggctgcgtattgtggtctggattgtcgccacgctgattgggctggtttttacgctggtctacgcctcacgcgtgaaaaagaatccgctgctgtcccgcgtccacgaatccgatcgctatttccgcgaacagcaggatgaagtcgtccagcgccctttcaccttcggtgactggctggtactgctggtcctgaccggcgtaatgatttgggtcgtctggggcgtgattgtccacgcctggtttattccggagatcgccagccagtttttcaccatgggcgtggtgatcggcctcattggcgttatcttccgcctcaacggtatgacggtcaacgtgatggcgtcctcattcaccgaaggggcgagaatgatgatcgcgcccgccttgctggtgggttttgccaaaggcattctgctgctggtcggcaacggcgaagccggggaacccagcgtgctcaatacgttgcttaacagtatcgcgcatggcatcagcgggcttaataatgctatcgccgcctggtttatgctgctcttccaggcggtatttaatttctttgtcacgtccggttcgggtcaggcggcgttaaccatgccattactggcgccgctcggcgatctggtcggtgttaaccgtcaggtgactgttctggccttccagtttggcgatggcttcagccatattatctatccgacatcagcctcgctgatggccacgctgggcgtgtgccgggtcgattttcgcaactggctgaaagtgggggcgtcgctgctgggactactgtttattatgtccagcgtggtcgtcattggcgcgcagatgatgggatatcattgatccaaaatgccggatgagcatcagcgccatccggcaatatctccatgattaaagcagtgatttcgcggcttctacaatcgcttcggcggtgagtccgtactctttttgtaagaaatcctgcgttcctacctgcccataacgctctttgacgccaacacggcgcatcggcaccggacagttttccaccagcacttccgccaccgctgaccccagtccattatggatgctgtggttttcacacgtgacgatacgccgcgttttttccgcgtagtttttcaccaacatgcgatcgataggctttaaggtgaacatatcaatgaccgcggcgctcacaccttcctgctccagttggcgcgccgcctccagcgcctccgccaccataatgccgttggcgataagcgtaatatcatcgccctcgcgcagtacgttgcccttgccaatggtaaaggtagagcctggcgcatagatactccgcgcctgcttacggatggtacgcagccagtaaaaaccgtccaggtccattagctggcgtaaaatatccgcgaacatcaccgcatccgtcacctccagtactacggagtgcgccagcccgcgaacaatccccatatcttcaaaagacatatgggtgccgccgttatggcacgctgtcactccggcatcggaggcgatcactttgacgttgttacgctgataatccagcgccataaagagctgatcaaaacagcgacggctggcaaaagcggtaaaggtatgcacaaacggtttacgaccggtcagcgccagccccgccgccgtgccaatcacattcgcctccataataccgcagttaatgacatgctgcgggtagtcacgcgccacgctgtccatcgccattgagctcattaaatcagcctcaagcgcaataattgggcttccggcctcaatctgcccggcgataaaaccggcgtaaactttgcgcatttcgatatcgtctttaagccctgcgggcgcaagcttaatcatgcatgacctccagttgatgaatggcctcattgaacgtctgcttcatgccatccgtcaggcgtaagtggtgagaattcgttaactgctccaggcatggcaccccctgccctttaatgctgtcaaggatcacaacccgtggctgggcatcggcgggcggcacaggctgaaccaccgccagtagtccggcgatatcatcgcctttgacggtgacgacatcgaaaccaaacgcacggaatttcccttccagatcgaatggattgataatctcctccagctcgccgtcaagctgctgtttattccagtcaatgaaaacggtcagattattcaggcggtggtgggcaataaactgaaacgcctcccagcactgcccttcattcagctccccatcgccgacaatgcaaaatacccggttgggtcgccgcgccagtttatgcgacaacgccattccgcccgcaatagagatgccctgtcccagtgagccggtcgtggcgtccacgccgcgcgtttttagccgatccggatggctgggaagacgggtgccgttctggttaagcgtattcagctcttcgcgcgggaaatagcctttaatcgccagggtactgtacaacgcggggcccgcatggcctttcgacagtacgaagtaatcgcgttccggccagtccgggtcggcagggtcgattttcatcaccgcgccgtacagaaccgccagagtctccactaccgacatgctgccgccatagtgaccaaagccaagatggtttaaggatttgagcgtggcgacgcgaatatcgcgcgccagttgggtgatttcggttacgttcattctttcgctccgctattttcctgcacttcggcagtcgcttttttgtttttggccaacacgttgtacgccaccagtagcgcgaatagcgccaccaccagccccgtgatagccatcggcgacagataacgcgccaggttgcccagcaaaataccgattacgccaaagtcagcatccgagaacgtggtattggcgaagccgatcgcgccgagaaccggcagtaacagcactggcaggaaagtgattaatagaccattagcaaatgcgccgatcatcgccccgcggcgaccgccggtggcattgccaaagacgcctgcggtcgcgccggtaaagaagtgcggcacaacgcctggcaggattaacacaagcttcatctgtccaagcaggaacagccccaccagcccgccgagaaaactgaacaggaagccaatcagtaccgcgttaggggcatagggatacaccaccgggcagtccagcgccggacgcgcgtttggcaccagtttttctgaaaagccggtaaaggccggaacaatttccgccagaatcagacggacgccttgcagaatgatgaatacgccggcggcgaaggtgattgccatgatgatggcgtacaccagatagttttgcccgccgctaaacgtcgcttcgacatactcacgccctgcgctgactgccatgatcagatagataatcatcatggtcagcgaaatcgagatagaactgtcgcgtaaaaaactgaggtttttcggcaggttcatctcttccgtggagcgggagcctttaccacacaggctgccaatccagccggaaagcacatatcccagggtaccgaagtgaccaaacgcaatgtcatcggtaccggtaatccgcctcatataacgttgagccaaggccgggaagaaggccatcaccagccccaggatcagcgatccggtgaagaccagccctacgccctcaaaccccgccacggtcaggattacgccaatcatacaggccatgtaaaaggtgtgatgcccggtcaaaaagatatatttaagacgcgtaaagcgtgccacgacaatattggccaccataccaaatgccataattaacgccgtggacgcgccatatttttccagcgcgattgagactatcgcttcattattaggaataatgccctgaatattaaaagcgtgttcaaacataccccctagcggatttaatgaacccaccagtacggttgcgccgccgccaagcacaataaaacctaaaatggttttaatcgtgcctttcaccacatcggaaaacgcttttttctgcgccaccagaccaatcagcgcaattaaccctacaagcaccgagggcacttttaaaatatcaacaacaaaattcagcgtttcaaggataaacatatccacctcgccagcaataattattgtttagcgaaccatgcgcgcagctgcgtttccagttcgttgatgtcgatgatgttattgatcaccaccagttggctttccggtacgctggcgctggccgcgatatctttggccattacaaaaagatcggcagccccgggcgtggccgatgaaagatcggagtgttccacctcggcgtcaatattgagtttctttaatacttttttaatgttcatttctaccataaaactactacccaggccggaaccgcaaattgccatgattttcattattgtcaccttttaaaagtagagttggtctgcatcacgcacgggcgtaatgttatttaccgcaagaaaatggaataaaatcagaaacggtcaataatcgttttaatgtcctccaggttttttgcctgatgtaatttttccatatctacatcactggaaaataattccgccagcgccgatatcatttcgatatgactgtgcttatcaggcgccgccagcataataatgatgtcaaccggatcgaattcgtctgcgccaaatgaaacgccgtgctgtagtttcagtaacgataaacctaaccctttcgccccctcttccggcctcgcatgcggcatcgctaaccctggcgctaatacataatatggcccaagcttttggtgctgctgaacaatcgccgtaaggtattccggtgcgataacacctgcgtccagcaggggtttgccgcaaatttccagcgcctgcggccacgtttccacgctctcctgtagcgtgatggttgcgtcagataaccaggttcccagcatgttattcgcccccacggtgtatgaaattatgaacaaactttattcaagccattcgatattagctgcgatcgttatcacaaagatagcgctaccagcgactattactcagaattgtgatagcgctatcaaattaaaatcatggtgtgaaatcacagcaaaaaagcggatttaaggcgtatactgccagtcatgcgaagcaaagaacgacaataaaaaagcatctcaacatgttgtaatgacgcaggaatttgtatgtcgataccccgtaaacggcgcagtaccggtaaagtgactatcgccgatgtagcccaacttgccggtgtaggcacgatgaccgtatcacgagccttacgcacgccggaacaggtctctgataaactccgggaaaaaatcgaagcggcagtgcatgagctgggctatatgcctaatctcgccgccagcgcgctggcgtctgcctcctcgcacaccatcgcaatggtcgtaccgaaccttgcggaagcggggtgttctgaaatgttcgccgggctgcaacaaattttacagcccgcaggctaccagattatgctggcggaatcgcagcatcgcgtggaacaagaggagaagctgctcgaaacgctgctggcctccaacattgccgcagcgattctgcttagcgtcgaacatagcactaccgtgcgccagtggctaaaaaatgcctctatcccggtgatggagatgggcgcgattcgcagcgatcctattgatatgaatatcggtattgataacgttgcggcaatgtatgagctgacggaaatgctgattcagcgcggttatcagaatatcgggctgctatgcgccaatcaggagcagtggatttttcagcaacatctgcacggctggtacaaagcgatgcttcgccaccatatgtcgccaaaccgggtgattaatgccgccttgccgcccaatttttctaccggcgcgtcgcaactgccggagtttttactggcgtggccggagctggacgcgctggtatgcgtatcggatgagctggcctgcggcgcgttatacgagtgccaacgacggcggatcaaagttccggacgatttagcggtggtcgggtttggcgatagcgatgtcagccgggtctgccagccgccgttaaccaccatggccgtaccgcaccgtaagattggcagtgaagccggacgggcgctgttggaaaggttaaatcagggaaactggagcgatcgaaaatccatcgcctccagtttatgtatgcgggaaagctgctaaaacgcttattccgtctcttccggtttctcctggagcgcggcttcgtttttggcgttgcgggtcatccacagcgccagcgctttgagcgaatctggcgtaaactcatcacagcgcgcggtgatctcctccggggtcagccaacacacttcgctgacttcatcttcctgaagcgcgaaaggcccgtgggaaacgcagctaaacagcgcgccccaaacccggcaatgttggtcttcaaagtaaaacagaccgtgttcggcaaacggcacgcctgcaatacccaactcttcttccgcttcgcggcgggcagattccagtagctgctcatcagcctgaaccacgccgcctgcggtagcatctaacataccgggcaaaaaatcttttgtttcggtacgacgctgcaccagaattttacccataccatcatgaacgacgatatacgtcgcacgatgccgtaagcgttgcgcacgcatctgttcccggctggactgtgcaatgacttcattgtcttcattcacaatatccacccattccgtacttgccaaacgacgctgttccaccatcaggaaaccttcttatttctggcgctcttacggcgcatttacgtttgtgaggtaaattacgagttaattgcaacctgcgcaatgatactttgatcattgagtgcgattacgctcaacacattatcatccagaataccgtagcttgccgcatacccgcctttcgggatgctcactgacccaggattaaagtgatacagtccttcctgctgttgcgccaccggcagatgcgtatgaccatagaccaacacatcgccagtatgcagagcgggcagattcgtcggcccgaagaggtgcccatgcgttaaaaatagccgcctctcttgcgtcaatatttgctgccacggcgcagttatcgggaaatgcagcagcatctgatccacttcgctatcgcagttgccgcgcacggcaatgatttgcgtcgccaccgcgttcaggcgttcggcaacctgagcgggcgcatagccttcaggcagcgcatttcgcggcccgtggttaaggacatcgcctaatatcaccagccaacgcgcgccgctttgcgcgaaccgctcaagcacgcgttccgtggcgggtaaagaaccatgaatgtccgatgcgaacatcagtttcatcgctcactcctcgttgtgaaaaacggcgttatgatactggaatatgaatagattttcagcctgaacgcttcgaggaaagcgcaataaaacgctgtacggaagcacgctgccactggaatgtcgcatatgccgccagcgatgccggcacgtcatcgccatgcagcgccagacgattgatcatcaatgccagatcggtatcggcaatgcaccattcaccaaataaattttgcgtcccctgccccaatagcgcttcagccgtcgcaaacagttttgccgcgctggcttttccagcctcgcttagcggcgcttttttcgccccggcaaacactacgtcggtaggccgttcttcgcgaagcggcagtaaatcgctgcgtagccacgcctgaatctgtcgcgcgcgggcgcgtttttgtaaatcgtgcgggtagatacgctcccactgcggcggcgcgaaacgctcctccaggtattccgcaatagcggacgactcgctcagctcaaaattgtcggcctcaagcaccggtacgcgctgcgtcagcgcatatcctcgccagccaggttgcagatgttctccctggtccagatcgcgagttttcagagtaaaggaaagccctttttcttgtaatgccacccaggcggacaagacgtagggagagaaaaagttcgcatccgaccacagcacaataacaggcttactcataatgtcctcttgagggcgtattaggtttcttcccaaaatatagcgtctttcgcctgctgtcacctgatgaaaactcacacacatcaggaggctttctatacttaattcagcccagactctttacgcacatgcaggagccaaaatgattgacctttactacgcccccacgcccaacgggcataaaataacgctgtttctggaagaggcggagctggcgtatcgtttgctaaaagtagatatcagcaagggcaatcagtttcgccctgattttttggctatctctcccaataataaaattcctgccatcgtcgatcacgccccggcagacggcggtcaaccgcttagtctttttgaatccggcgaaattcttctctacctggcggaaaaaagcggcaaactgcttagcggggagctgcgtgaacgccataccacgctgcaatggctgttctggcaggtcggcgggttagggccgatgctgggccagaatcatcactttaaccactttgcgccgcaggccatcccctatgcaattgaacgctatcaggttgaaacgcaacgcttatacaacgtcctgaataaacgcctggaaacctccccgtggctgggcggcgaccactacagtattgcggatatcgccagttggccgtgggttaacgcacatcagcgtcagcgaatcgatcttgatacctacccggcggtgtataactggtttgaacgcattcgcacgcgtcctgcgacagcgcgcgcactgttacaagcgcaactgcactgtaacagtacgaaagcgtaacgcggtagcatacatcatgtatgatgtagaggtgtatacacggaaaaaacctgcgtccggcacccttattcgtattaaaaacctgacattagggaagaggaaatcctccctactctggaggtcatatgcagattctgattaccggcggtacaggcctgatagggcgtcatctcattccccggctgttaacactggggcatcaggtgacggtcgttacgcgcaatcccgataacgcgcgtcagattctcgattccagagtgacattatggaaagggctggcggaacgtgagcacctcaatgagattgatgccatcatcaatctggcgggcgaaccgattgccgacaagcgctggacgtcgcaacaaaaagaacggttgtgccaaagccgctgggctatcacgcaaaagttggtggatttaattcatgccagcgcaacgccgccctcggtgttgatatccggctccgccacgggctattacggcgatctgggtgacgttgtcgtcactgaagatgagccgccgcacaacgaatttacgcataaactttgcgcccgctgggaacagattgcctgtcgtgcgcagagcgaccagacccgcgtctgcctgctgcgtaccggcgttgtcctggcgccgcaaggcgggattctggggaaaatggttccgccgtttcgcctcgggctcggcggtccggtgggtaatggtcggcaatatctggcctggattcacatcgacgatatggtcaacggcattctgtggctgctggataacgatcttcgcggtcccttcaatatggtctcgccgtatcccgtccataatgagcattttgctcatgcgctgggtcgcgcgctgcgccgtccggcgattattcgcattccggcgacggcaattcgcttattgatgggagagtcgtcagtgctggtgttgggcggacagcgggcgctgccaaaacggcttgaagccgccggattcgcatttcgctggtatgatttagaagaggcgctggcggatgtgattcgctagttcccaaagcgccgtatcctgcccggtgagcgatgcgccgccgggcttcttttatttcagcgagcctttcaggaattgctgtaaacgcgggctttgcggattgccgaacacctgctccggatcaccctcttcttcaattttcccctgatgcagaaaaataacgtgcgaagagacatggcgagcgaagcccatttcatgcgtgaccaccaccatcgttttgccttcttccgccagttgttgcatgatgcgcaacacttcgccgaccagttcaggatcgagcgccgatgtgggttcatcgaacagtaaaacgtcaggttccatcgccagcgcgcgcgcaatagaaacgcgctgctgttggccgccggagagatggacgggatatttgccctgagcgcgctcatcaatccccaccttcgccagatatttcaacgcccgctcgcgcgcgtcgtgcttgcttaatcccagtacctgaatcggcgcttccatcacattttccagcaccgtcatgtggctccagaggttgaagtgctgaaacaccatcgtcaggcgggtacgcaacaagcgtagctgatttttatccgccactttgagctgcccatctttgtcgcgcaccagattaatgttctgaccgttcacgataatcgcgccttcgctcggtttttcgaggaagttaatacagcgcaaaaaagtgcttttaccggagccggacgagccgatgatgctaatcacatctccggcgcgggcctgcagcgatacccctttcagcacttcatgaccgccgtagcgtttgtgcaaatcgataacgtgtaatttattttctgacatcatgttactcgaattatttagaggacacgtgctgcaaccagcgtctttccgcccgacggaacaggcttatcaggacatacgaaatgagtaaatacaacacggcggcaatgccaaacgcggtaaacggctggtaagtcgctgagttaatatcgcgggcgattttcaacaaatccggcaccgtcgcggtaaacgccagcgccgtagagtgcagcattaaaatcacttcgttgctgtaggcaggcaaggcgatgcgtaatgccgacggcaaaataatgcagcgatacattttaaatgacgagaagccataggcccgtgccgcttcaatttcaccgtgcggtaccgagcgaatcgccccggcgaaaatttccgtggtgtacgcgcaggtattcagcgtcagcgccagtacggtacagtttagtccgctgcggaaaaacgcgttaagaagatcggtgcctttgactatctccagcgtatacatccccgaatagaacaccagtagctgtacgtacagcggcgtgccgcgaaaaatatacgtaaacagccagatgggaaaacggatgaatttattactggaaacgcggcctaccgccagaatcaccgccagaagaccgcccatcaccaccgatgaaattaacagccacagcgtaatcgccacgccggtaaaacgatagccatccgtccaaagcagggatttccagtactcctgaatgatctcaatcacaaatcggccctcttcacgcccacggaatagcgacgctcaagtaagagcagcacaccattggaaacggtggtaaataccaggtagataagtccacagaccacggcaaaatagaaaggctcccaggtacttttaccggcaagctgcgtggctttgacgacatcttccaggcccagcagcgacaccagcgccgtcgctttgagtatcacctgccagttattgccgatccccggcagggcgtaacgcatcatcgccgggaacataatccgccggaaggtttgcccgtgggtaaaaccaaaggccgtcgccgcctcgatatggcctttcggcaccgccataaacgcgccgcgaaaggtttcggtaaaataggcgccgtagatgaaaccaagggtgataataccggccaccatcggatcaatatctatctggtcgatacccagcgaatcggtcaccacgttaagcgcgatttgcaatccgtaaaatatcagcagcattaagaccagatccggcaccccgcgaatcagggtggtgtacccttcaaaaataagccccgttacccggttttgcgaaagcttcgcccccgcgccgacgagaccgataagcacggccagcaccacggaactgagcgccagttccagcgtgacgatcgcgccctgtaaaattacgcctgaaaacccgtacaacatgcagcctgtcctgttgtgtgtggtgaagtaataagcctcttttgcatttttgcctcacatcacgccggatggcggctgtgccttgcccggcctacgatgctccccgtaggcctgacacgcacagcgccatcaggcaatgcagacagtcaacattctttgggctttatctgcaccgacggtgattaaccgccataaacatcaaaatcaaagtactttttcgccagcttttcgtaagtaccgtcagcacgcatttcagcaaaggctttgttcagcgcttcgcgcagctcgttatcctctttgcgcagccccataccggttcctacgccgaataacttctcatctttcaccgccgggccgccgaatttatagtcttttccgacgggctgtttaaggaaaccttcgctggccgcgacctcgtcctggaacgccgcatcaatacggccagccgtcaggtcggaataaatgttgtcctgcccctggtaagagacgatctcaatccctttcggcgcccagtgctcattgccgaaggtctcctgcgtcgtcccctgtagcacgccgacgcgcttgcctttcagcgacgcgacggtcggctgaatatcagagttcttcgccaccaccagacgggaatcagcggcgtaaagcttgtcggtaaacgcgatttcctgctggcgcttttcagtgatggacagcgaggacatgatggcatcaattttcttcgcttttaaagacggaatcagcgcatccagcgggttttccacgaacgtacactgtgtgttgatacgtttgcacagctctttggccagatcgatatcaaagccgaccaattcaccttgtgcatttttggattcaaacggtgcgtatgtaggatcggtaccgatgcgaatcttttgtggaatagcggcaaatgctgcggtagcgctggaaaatgccagcaccagagaaagggataacgccagttttttcataactatcctcaacagactgtctttccaggagatctttacagatccgatgcgactatcgtgccattaatcaggccgacaaggcaaagcattctaccttgtcagccggtttattttgcataaaaatcgattaagtatgcatttatgcgcctgttccgcaacggcttatgcaccaaaaaggggcaaaacatctattttgcaccgtgatagttccccagcgcggcgcgttatccccttccctcaatcgccgtaaacattaaaatcgaagtactttttggccattttgtcgtaagttccgtcctggcgcagttcggtcagcgctttatcaaacgcggcttttagctcggtatcatctttacgcagcccaacccccgtcccgtcgccaaaatattttttatccttcacggaaggaccggcaaacgcatactctttgcccgctggctgcttcaggaaaccttcgctggcggcgacttcatcctgtaatgcggcatccagacgaccggcggttaaatcggaatagataagatcctggttggcataagccaccacatccacacctttagtgcgccagttatcattggcgtaagcctcttgcgtggacccttgcagcacgccgacatgcttgcctttcagcgattccagcgtcggctgaatgggagacccttttgccgcaatcaggcgtgaatccgccgcgtaaagtttgtcggaaaacgcaatttcttgctggcgtttatcggtgatagagagcgatgaaataatggcatcaatttttttcgcttttagtgagggaataagcgcatcaaagtcgctggcgacccaggtacatttcacctgcatacgcttacacatttcattaccgagatcgatatcaaagccaataaactcgcctttggcatcttttgatgagaaaggcgcgtaggtggtatctgttccaatacgaaccgtttgcgggagcgcggcgtaactggccgccgtcgcgcccagacctatcagcaaagacaaagcgagaacggtcttcttcatacatacccctcaagtggcgtcattttcttatgttttacgtggcgttgtgtgtttgcagactttttcatgcaggtcttatgccattttcacgtcagcaaaacgattcgacgttaaatttgttaataaaacgttgcaatattgtcctgatgttgaagatagcaggtatgacggttgaaccgcagcgtttcggcggcttttaacgaattaaatgttgaggatatgatcgcggttacaaaattgccctgaaacagggcaacagggacaataatgcacgctaaacagacaacgctatgcgccctgccagcgaacaaaaagatcgtgcggaagggggatatcaaactgatccagcactcggttaaccgtttgatttataacatcatctaacgtctgaggaagatgataaaaagccggaaccggcggcataatcaccgcgcctatctcagcggcctgggtcattaaacgcaaatgcccgatatgcagcggcgtttcgcgcacacacagcaccagaggtcgccgctcttttaatatcacatccgccgcgcgggtaagcagtccgtcagtataactgtggacaatccccgacagcgttttaatcgaacagggcaagataaccattcccgccgtcgggtaagagcccgaggaaatgctggcggcaatgtcgcgcgcatcgtgcgtcacatcggccagcgcctgcacctcgcgcagcgaaaaatgggtctccagcgccagcgtttgccgggccgcctggctcatcaccagatgcgtttccacgctatcgacatcgcgcaaaatttgtaataagcgcacgccataaatcgctccgctggcgccgctaattcctacaatgagtcgtttcatgttctcttaccgtttacgagcgccgttcatcccactgtgttacgtaatcggctcaaagtgggtctgaagagataccatgacaaaagaatccctatcataaaagccagctcaaccaacattatcactaccccctgctcactaaaccaggtgccgaccataatggcaaaattggtgataatgacaaatcgggccgtccaggggaaaagcggcgatcgatagcgtagcaaatcgctggcgtacgttccattacgcaccgattgtcggaagcgatactggcaccatccgatggttatccatgccaggcaacccacctgcccggtactggcgatcagatataaataaaattgctgtgcgggaatatagcgggtcagcaacgacactaacgccaacaaggccgtgattaaaatagcatacaccggcacgccgccgccgttcgttttaccaaagcaggctggcgcaaagcgatcgcccgccatagaccacagcatacgcgaactggcgtaaatggccgagttagcggcagaaaccgcggcggaaaagatcaccagcgtcatcagcgtatccgcccccggaatgcccgcgtgggagaatacccatacaaagggactttgtccatttggcgtcagttcatgcggatagaccagcgccagcaccgcaatcgccaggccgtaaaacaaaatgattctgagaccgatccccaggatcactttcggtaaaataatgtgcggcgattcggtctcccctgccgcatttcctaccagttccaccccctggaaggagtaaatcacgatcgtcatatagaccacaatttgctcccaaccgtggggaaaccacattccgtctgtttttaacgtcgggtgccagtcactatggcccattagcgagtagatcataaccccgcccgcgcaaataaacagcacgatcgcgaaaaccttaatggccgaaagccagtattcgcattcgccaaaactttttgcggaggtgagattgatggccgtcaggatgagcagaatcgccaggcagaacatatataccggaaccgcggggaaaaactggtgagcaataaaccctgcggcagtgaggtcggccgccagggaaaagacccagctaaaccagtaaagccagccaatggtatagctccagcaaggtgacggcataaacatcagcgcgtaatgttgaaatgaaccggagtgaggaaaggcgcatgataattcgccaagacacatcatcgtcgccagcataatggttccggcaaacagataggccagtaaggttcccgccggcccgacgctgcttaacggttcggcaatgccgataaataagccggtgccaatcgtgccgcccagcgacatcatcagcaggtgccgcttcttcaggttacgccgcagaccgccttcaggctctgctggcggagattgttgcagggtatccatcgttactccctgtctttcgtgaggtcaaagatgccgccgcgacatagccgcggcggttatgcgttaacgcgtaaacctccaggcgacgcctttggtctggcaggccattaacaggcccgtataatccagctcaaagcgaaccacatcgcctacttttagcgactgacgacaatcttcaatatccaccagcgtatgatcgctggtttgtcctaagatagtgatagcgtcgtcgcatggcacacagttatccgacggcacatcctggcgaccaaacgccagcaatgcgcgtcggcgtatgccacgatcgacaaaggttttactttgcaaaaaggcatcgacgcccagctccccgaccgggacggtaggtttactgttcagttcgatgatttccgcttccaggatatacatatcggaacaggctttatcgaccggttttgcggagtggtgaaattcattcaggtatttcatgtccacatattcaatgccgaattcatgcagtccgccgatgcgcagatgattcagtccctgcggccagatacctttatccagcaggtgatagctggtgcagtttcccgcagaaagccgccggacaggaataccgctgtcagcttccagccgggcggccagcgccagaaaatcctcgccattttttaccgttggcaacacggtgccgtaacaattaaagttggtgcccagtccatataattccagaccgggcagaccagtaatcagagtcacggtctcaagaatgcgttgatattcaccaaaccagataccctcgcgtaaatcgcccatatccaccatcagtaatacctgatgcgttttcccctggcgttgggcttcttgcgataatgcccgtaataccaccggctcgctatttaaactaatatccgcgtagcgcaccacatcttcgatttcactcagacacggactgcgtaacaggcaggtcgtacatcctgtctcgcgtatttttttcaaattataggttcgtgattcagcgataacggtaattccgccgttgaacaccgcctgcgcggtttccacgcagccgtcaaaaactttattgacagccatcacgtcaataccgctacttgccagcagagctttttccgtgcgggcgttttcttccagcttgcgtagatttatttccagaactggcatatacattttattttcctcccgccatgcttaaacgggcattacgtttctgcgcccgatggtaaatgtactccgcgacgacaaccgccagcacggctccgccaataattttcccggcgtactggaaatatccgcccatatcaatttgagaaggcggaataaataacagcgcaacggcaaaggcgatagaaagaaagcccagcgcgggtaaaatagccggtaaaaccttgcccggaattttaaaacttcttggcgtatccggctgagtcttacgtaaacgccagaacgctgggaacatcaccaggtaaggaataaaataggtgatggtcgttagcgccgttaacatccagtaagccgccgcaacgcttggcgaaataaaagtcgaaaaacacaggaccgtgacaataatcgcctgtacagtcaaggcaaaggcgggcgttttccacaccggatgtaatttgccgattcggtcccccagcagattatcttcacgcgaggcttcctggagcatataaatcggccccaccagccaggagttaatctgcccgagagcgccaaaaaacatacagatggccataacaggaattaaccacggcatatgcagcgtatccgcagcagcatgcatagcctgcatgacgcctgccacgatgtcggttttcccggcgggtaaaagcgtatttagcgcccaggtgccgaccatatagatcccgacgataacggcggcggagacggccatcgctcgcggaaaatcacgctgtggattacgggtacgcccggcaatcatcggggcgacctccagtccggcaaacgcaaacatcatgctggataagaaaacgatcgtatcccagtgtccgagatccggaatccagtttttcgctgtagtgtagtccgtctgcatctggtgtccggtacatagccatactaccgccagcaaaatgaggatggcggagggaataaatacgccgcaccaggcgctgatgctattaataatttttgtccattccatcccgcggatattcatcagcgttaatagccagaaaattaccgcggaaccaataccgataaacgctttattttccgccaggccgccgccgatcatatagcccaacgcggtaaagccgaattgcagcattaatgggaaaaacagtacgcaggaaaagagaaaacaaaccacgacaatccatgcaatacgtttaccaaatgcctctttaatccagacaaatatcccgccatctttcggccagccggttgacagctcgccgcataccatcgctaaaggaaaaaacaagcagaatgcggcgatcacccataacaacatggccgatgccccgtaaggcgccacgttagggatttgccgcaaactcagaatagcgatgacattcataaagacaatgtctttgatgccaagtaagccagaattcgtgttactcatggccatctcctgttatgcattcaggcatcactgccctcttcttatcatctgacgacgggcttcagcatgaaactgaagcccaaaacagtattaataaatgtcgtacttgaccatatcttcgtaactgtcttcccgacgaatcagacgcgtgtcaccatttttatcgatcatcaccacgcccgtgcgcggacggttgttataaacggtttgactttcaatggtgtatgccccggcatcaagaaatgcgacaatatcgccaacatgagtctccttcggcagtaaaaactcttcgcctttcactcccatgtggaaataatctccgccatcacacagcggcccggctaattttatccaggcgtcgtgcgctgccgtcatgcgagaggcgttatagacataaaagaaccagtcaaaatgctggctgtcagagagtacgctgtaaccagcgtcgacaaatttccattcaacgtggcattccacattgccgttaagatcgtaatttgttttacgtttttcgcaggagacttccgtaagtaaaaccgccgccgacccggtcactttacgtcccggttcaatacatatttccacatcggtacgccatttatgcacttcgcgaatgaccgcatcggcaaaatcctgggcggtaataccggcatacatattatcttttaacgggtcgccattctcgtcgtcatatttatagggaaccggaattccgccgcccacgttgatcaaatcaaatttaataccaagcacctcttccaggcgacgggattcatccaccagcactttagtcgcttttgcgaaaggctctgactccggcacctgatcgcccacatgcatatgcaagccgcgcaaatgcacataaggcatcgccagaatgcggcggcaggtttcttccgcctgttccaggtcgagacccgacttcgcatggaaagcggtaaccagttccgcatgcgtcgccgagggaacattcggttctacgcggacgcaaacattggcgactttcttcagcttgcgagagatggcatcaatatgttccagctcatacaggctatcaacattaataagatacagatcgttggcgatggcatattccagatcggcaggctttttcaccacgccgttgaagacgatctgatcgccgcgaaagcctatctccaggcacttgcgaacctcatattgtgagtttgcctccgcgcaaattccggcgtcacgaatggctttcaacacccccatgaccgagcaggtttttgacgcaaagaaggttttggtatttttatgcgccgcaaatgcctgctggatttcatgaatgttacgaataatctccggctcagaaaacacatagaacggcgtggggtactggcgcgccagagcgtccagatcgaccccttcaaaacacaaatgaccgtctttgtgctggaaacggcgatcgccgttgattacctgctcacgtagctggttgtaattctgcataatcgagtcagtcataacgccctctgcttaatgtttatggtaaaaatccgcattctttacagggataaagcaaaaggcatgccactattttttatcaaaataatcaattagttataaaaataagctttttctcattttcgtcattgagtttgctattcatcacaacgacgaaaattcgtcacttttataatgacaacatgaacaatagatatgaggaatgcatatatggcatccaccaatcaggagctggcctcggcgctcaggatgttttcccgctttttcgatttgattcatcagccgttggccgtcattaatgagcgtggtgaatacgtttactacaatcaggaaagcgcggatctggacggctatagtattgaacgggcaatgggaaaacatatgctggatgtctatccgggcatgaaagagacgcaaagtacgatgctttcatcgttaaaaaaaggcgtggaatacattggccattatcaaatttattacaatgcgcgaggccaggccgttgactatcagcacaccaccgcgccgctctatgcaagcgatggcggcatggtcggcgttatcgaaatcggcaggaatatgtccggcgtcaggcggctccaggagcaggtggtagaactgaaccaactgctgtatgccgatcaccatgagaagcaccatgccattattaccgaaaatccggaaatgctcagtaatatcgccaaagccaaacggctggccgccagtaatattccggtgacgattgtcggggagacgggaacgggtaaggagctattttcccgcctgatacatcaatgcagcaagcgggcgaataagccatttatcgccctgaactgcggcgctctaccgcctacgcttatcgaaagtacgcttttcggcaccgtgcgcggcgcctataccggcgcggaaaatagccagggctatctggaactggcaaacgggggaacgctctttcttgatgagctgaacgccatgccgatagagatgcaaagtaagctgctgcgattcttgcaggataaaaccttctggcggctcggcggacaacagcaactccactctgatgtcaggatcgttgccgccatgaacgaagcgcccgtcaaattaattcaacaagaacgtctgcgggcagatcttttttatcggttgagcgtcggaatgttgacgttaccgccgctgcgcgcccgcccggaagatattcccttactggcgaattattttattgataaataccgtaatgacgtgccgcaggacattcacggattaagcgagacggcgcgtgctgatctgctcaatcacgcctggccgggtaatgtcaggatgctggaaaacgcgattgtacgcagcatgatcatgcaggaaaaagatgggctgctcaaacacatcatttttgaacaggacgagttaaatttaggcgtaccggaaaccgcgccggaaaatccccttccctcgtcacccgatccgcagtatgaagggtcgctggaggtacgggttgccaactacgaaaggcatttaatagaaaccgcgctggatacgcatcaggggaatattgccgccgcggcccgcagccttaacgtatcccgcaccacgttacagtacaaagtacaaaaatacgctattcgcttcggcgtggtgcgtaattgacatcggccagcggcattgcgccgctggcaaagccattagccttcgttatgcatttccaggttttccatttcgttctggaacagcaccgctttggcgtcgtcattacgtaatgaatccaggaagtcgaggtattgctggtctacgtctttggtgacatatatcccgttaaataccgaacactcaaactgctggatatccggattttccgcgcgtacggcttcgatcagatcgttcagatcctggaagataagcccgtctgcgccgatgatctgacgaatctcatccacctcgcgaccatgcgcgatcagctcattggcggtcggcatatcaatgccatagacgttggggaaacgaatttccggcgcggcggacgccagataaaccttcttcgcgccggcttcccgggccatctcgatgatctgctctgatgtggtgccacgcacgatggaatcatccaccagcaggacgttcttatcgcggaattccgcgcgattagcattgagcttacggcgcacggatttacggcgtagctgttggcccggcatgataaaggtacgtcccacgtaacgatttttgacaaatccctggcggtacggcttgccgagaatacgggcaatttccagtgcgatatcgcaggaggtttccgggatagggatcacgacgtcgatgtccagatcttcccattcacgagcgattttttcgccaagtttggtgcccatattcacacgagcgctgtagacggagatcttgtcgataaaggagtccgggcgagcaaaataaacgtactcaaacagacaggggttactgaccgggttatccgcgcactggcgcgtgaacagttgccccttttcggtaatatagatagcttcgcccggcgcgacatcgcgcagaaactcaaagcccagcgtatccagcgccacgctttcagaagcgaccatatactccgtacgaccatcgccaacgtcacgcttgcccagcactaacgggcgaatgccgtgcggatcgcgaaaagccaccatgccgtggccgataatcatcgccacgcaggcataggcgccacggatttgacggttagtcgcggcaatcgcggcaaaaatattgtcggcttccagcggatagtgacggaagttgtcgagctcgctggcgaaaatattgagcaggatttcggaatcggaggtggtgttgatatgacggcgcttttcttcaaacagctttttacgtagctcgtgcgcattagtcaggttgccattatgggccaacgtgatgccatacggcgagttaacgtaaaaaggttgcgcttccgaagcgctggagctgcctgcggtagggtagcgcacatggccgatccccatgttgccctgcaaacgctgcatgtggcgagcttcaaaaatatcgttcaccagcccgtttgccttacgcaagcggaagcagttattcgcatcaatggtgatgataccggcagcatcctgaccacgatgctggagcactgttaacgcgtcataaatcgactggttgaccggcataacaccggcgataccgacaataccgcacatacgtcattttcctcgttaagccacatctcagaacctgttacgtcctgggcaagaaactcgacgagctttgcagatagtcaaagcaccatctgatgatgaagctgaactgcgggatgagctgcgatttgctccagtcttcgcttttcgacaagccggtaaaggtatcaaggaagaacagaatggcggcgacaatcagcgcgcctcgcagtgcgccgaaacagatccccaacacccggtcagttcccgacaggccggtcttttctactagctgacctatcacaaaattcacgatagcgccgacgataagcgtcgcgataaacagtaccgcgatagcaatcccattacgaaccagttcgtcttcaaagcccgtaaaccagacagacaggtaagtgtagtagtgactggcgacaaagaaagcacaaccccacgtcaccagcgataacgcttcacgaacaaagccgcggatcaggctaaccagacaggaaaaagcaatcaccgcgataatggcgtaatcaatccagaccatagatgtcccacgattttacgccctgtcgtcctgttcggggcgcattctaacagaaaaagaaaacgtttgcgtagggatttccttcccacgcgtaaataaaaatggcgctgaaaaaatattcaacgccatcacactttttatctcttcgggcacgaccagaagagctgccatcggcctgataagcgcaggatacccggttcattccttctgccggatggcggcgtaaacgccttatccagcctacagaacttcggctattaccagatgaacaccgtaggccttaacgctgcgcgctcaggcaaaacgcgccttagttcgggctatatcccatcaccacgccgcttaacccggaaatctgcttgagctcgccaagcgatcctttcatcttatctttcgacgcatccggcccgacgagaatacgggttattttaccctgtaccggcgttgagggggaagtataaacccggaacccggcggaacgaagcttgccgactatctcgttgactttatccgcgtttttcagcgcgcccaactgtacgacataggctttgccggtcggcgcaggtttatcgtcggcgactggttgcggcgcgggcgtcggcgtggaagcggcgacaaccggctgttgcggtttaggctgcggcttcggcttttcaaccggcttcggtttaggcgtctccaccggtatcggatcaagctcgacattgttagacgccatgcgcgacgggtccagcgacggcgctgccgcatctcccgcccgcacctcttcagccgccccttccggcggctgtgtcggcagcgcctgcgttgcggcaggcatcatatccggctcatcgcggtcgccaggcttcggtaccagtggaatcgcagcaaattcatcctgataatgctttttctgtccgtccagcagaccgggaagcacaataacccccagcgcgactaacacaatcgtgccgactaaacgattctgaaacttactcgccaccgattctccccgcgtctatcacttccataacatgtgcgacggtgtggaacgatccgcacaccagcacggtatcttctggctgcgccgcgtcgatagcggcctgccatgcctgcgcgacgctatcatagacattccctttccccagatgttccagaagttgttccgccgtcgcgccgcgcggcccctctaacggagcacaataccagtcgtcaaccacgcttttcaaccaggctaacgtgccggcgatatctttatcatgcagcataccaatcaccgcaagcacgcgcccgcgtttcggcaacattttcagacgacccgtcaggtattccgccgcgtggggattatgggcgacatcaaagataacgcgcggcgactcactcacgatttgaaaacgtcccggcaaggtagcctgcgcaataccgtcgcgaatcgcctgctcgtcaatattcaacctgctggcgcgcagcgcggccagagcggtggcggcattcggctgaggaacctgcggcaacggcagtccggcaagcgtgccgtcgccatcggtaaacgcccagtgggtcgctgtcacctcataacgccagtcaacgccgcgacgccgcaacagcgcgccggtctcctgcgcgacatccgcgatggttgccggcatttccggttcgccgacgatagcgggtttttccgcacgaaaaatcccggctttctcgcggccgatactttcgcgatccggccccagccagtcagtatggtcaagcgcgatgctggtaattaccgctacatcggcatccacaatgttcgtggcgtccaggcgcccgcccaacccgacctccagaatcaccacgtcaaggttagcctgtttaaacagccacaatgccgacaacgtgccatattcaaaataggtcaatgaaatatcgccgcgcgccgcttctatttccgcaaaggatgcggtatgcgcggattccgctaattctttcccctgcacgcgcacgcgctcggtgtaacgtaccagatgaggcgaactatagacgcccacacggtatcccgccgcgattaacaccgactccagcgtgcgacaggtcgtacctttgccgttggttcccgcaacggtaaaaacgaacggcgcaggcttgaggatgtccagacgcgctgccacctggcttacgcgctcaaggcctaaatcgatactcttgctgtgcaggttttccagataagaaagccacgaggccaggggcgacgcagcttgaggtatagatttgtttttcattgtttccgctgcttctttacggtgaaaagcaaaagggcagagcctgcggccctgcccttttcagttatcaggcctcagactcctgatccggcgccggaggcaccaccacgccttcacgcggggcgtccgggttcggcgcgggcagattcatcagcttcgccagaatgctcgccagcttcaggcgcatttccgggcggcggactatcatatcaatagcgcctttttcgatcaggaactcactgcgctggaatcctggcggcagtttttcgcgaacggtctgttcgataacgcgcgggccggcgaagccaatcagagcttttggctcggcgatgttgagatcgcccagcatcgcaaaactggcggaaacgccgcccattgtcggatcggtcaataccgaaatgtagggcagaccacgttcctgcattttagccagcgccgccgaggttttcgccatctgcatcagcgacatcagcgcttcttgcatacgcgcgccgccggaagcagagaaacacactaacggacagttgtcttccagcgcctgttcaacggcgcgaacgaagcgtgcgccaacgacagaccccattgagccgcccatgaacgcgaattcaaacgcggcggcgacaaccggcataccgtgaagcgtccctttcatgaccaccagcgcgtctttctcgccggtttctttctgcgcggacgccagtctgtctttatattttttggagtcgcggaacttgagcacgtcttttggctccagctcgctacccaactccacaagggaaccttcatctaacaggctatgcaggcgattgcgcgccgacatgcgcatatgatggtcacacttaggacagacctcaagattacgttccagctcagcgcggtataaaacctgaccgcagctatcacacttggtccacaccccttcaggaatgctagccttgcgggtgggagtaatgttgcttttaattcgttcaatccagctcattggtgacctttctgcctgaaccttagtcagctttattataaggggcgcataatgccatttttgcccccaacagaccatgaatgttgcacattaaaacataacagcccgaaactttggataaaaaagtggtcgaaccgctgagttactttctattttgcggcacgcgacgcagcgcgcttatgccggacaatctcaatgacgccaggtaatatcgaaaccacgataatccccacaatcagcagcttaaggttatcctgaatcaacggtatcgtaccgaagaaataaccggcgtaggtaaagagcagcacccacagcagcgcgccgatgacgttataggcggcaaaatgccgataggacatgtgccccatccctgccacaaacggcgcaaaggttctgacgatcggcacgaagcgagcgagaatgatagttttaccgccgtgtttttcataaaactggtgggttttatccagataactacggcggaaaattttcgaattcggattactgaacagtttttcgccgaacagtcgaccaatcgtgtaatttaccgcatcgccgacaattgcggcgatcagcattaacgccaccatgacatgcacattgagatcgttggtttccagcgaagccagcgccccggcgacaaacagcagcgagtcgcccggcaggaacggcgtgacgaccaggccggtttcacaaaacagaatcaaaaacaaaatagcgtacacccagacgccgtactccgcgaccagctccgccagatgcacatcgatgtgcagaataaaatcaataataaagtagatcaggtccatatttgtctttgcctttctacccgacacgtttcgggtgtgcgattcggattagtccgccagaaatagcgggcccattggcggttttggaaggtcaaaccggtcagggtaatccaccgcaaccaaatatagcccttccgccttcgccgttgccgccgccagcgttctgtccctggccgctaacagctctgcgatccagctctccggctggttgtgagcgcctacttccagcaggctgccgacaatattcctgaccatatgatgaacaaaggcattcgctttgatatcgaccaccacataagggccgtggcgggtaacgttgatgtgcatcacattacgccacggcgtgcgcgactggcactgcactgcgcgaaacgaggtaaaatcattttcgccaagcagacactgcgccgcgcgatgcatccgctctgcatccagcggctcatagtaatgcgtcacgccttttgctaataccgcaggacgcagtcgatgattgtagatgatatagcgataacggcgagccgtagcgctaaatcgcgcgtgaaaatcatccggtacagttttcacccagcgcacggcaatgtcaccaggcaaattcgcatttacccccagcgtccatgccgcatctttgcgcaatgcggtcgtttcgaaatggacaacctgcccggtgccgtgaacgccggcatcggtacgcccggcgcagaacacgttaataggttcatttgccacctgcgagagcgctttttccagcttttcctgcacgctgcgcacttcattctgacgctgccagccataatacttgctgccgtcgtactcaatacccagcgcaattttatagaccgccgatgattgctgtccggacatcagtacagatactcctgcaccagcttctccgcaattttaacggccatcagcgcgccgccgaaacgcacgttgtccgccactgaccagaactgaatttgttccggcataccgtaatcattatgcacacagccaatagagagctgtggattgccggaagcgtcgcccacctgcgtcgggtaatccgtctcttctgacagtacgatatcttcaccgcgggaaaatgcctcgcgcgcctcttccgccgccagcggacggagcgcttcaaagctcaccatctgcgcatggccatagaacaccggcgactgcacgacactggcggagatcatcacgccatcgtcctgcaaaattttacgcacttcatcgacgatacgacgttcctggcgcacgctgccttcccgatccggcagcagcggcagcatattgaacgccaactggcggccaaagaaatcatcttcatcaatcggtatgccgttaagcaacttcgcactctgtccggccagcgcatcgaccgcttttttcccctgtgcggacgctgataacatactggtgacggcgatgcgcgacagtcccccctgatcgattaacggcttgagcgccgccagcagttgactggtcagactatcggcgaccgcaatcacgttacggttacggtaatccgccagtacatacgggttaacttccggcacgaccagcggcacatcaggctccagcgcgaacagaccgctggaatctatcaccaggcaacctgcattagtcgcgtcgtctatccaggcagccgatgcctctgcgccggcaacgaaaaacgccaactgcgcctgcgtccagtcaaagtccgccgcatcctggacaatgaccgacttgccaccaaaacggaggtgctcgcccgcgctttcatgacgcgccaacgcataaatttcaccgaccgggaactggcgttcagccagtgtttcaagcagggcttcgcctacggcgcccgttgcgcccagaatggcaatgttccagccttcagacatggtgatttactccagaaatacataagcgtccctgtcgcattattcgacagggagcattaagaagacattaatgtgccgggtgatgaacagcgttaaaacctagcttacacagcaaggcggctgccgtttcgtcgtcacacatcacgtataaagacgaccattcacggcgctcaagataatttttacgcaatttatcaaattcacccggaattccagcgactttacgcagtggcgcatcgtcgcggcgcacatcatacaccaaatgcgccagtcttttcagcgtcggttgatccagcgggccatgaagcgtaatacgaccaaactcaggcgcaggcagtaatgtctccagcgcgacacgctgctcgcgaccgataaacgcgctatacgcctcaaagacctgggtggtgccgcgcgctttgccttccagcgtatagccggcaatatgcgacgtgccgatatccacggcttccagtagcgcgacgttaagatccggttcgccctcccacacatcaagcaccacgctcagcggctgcccggcattaagtcgcgccagcaacgcggcgttatccaccaccggaccgcggcaggcgttaatgagaatggcgccgggtttcagtcgacggatcagcgtctcatcggccagatgcagcgttttgtacggtccgtctttatagagcggcgtatggaaagtcaggacatccgcttcctgcaccagctcatccagcgtacgaaaatcaccctcgtccccgcgtgcggcgcgtggcggatcgcacagcaacgtgcggatacccaacgcttcaagcctggtctgtagccggcttccgacgttacccacgccgacaatccctatagtgcgatcgcgtaacgaaaagccgtcacgttcggccagcatcaacagcgcggaaaacacatactccaccacggcgatagcattacagccgggcgcggctgaaaaaccgatgcccgcctgcttcagccatgcctcatccacatgatcggtgcctgccgtagcagtaccaacgaagttaatcggcgtgccgctcagcagcgattcattcactttcgtgaccgaacgcaccattaacgcatcggcatggttcaattcttcaacggggatcgggcgacccggcacttcctttacctcacccaggcggctaaataattcgcgggcgtaaggcatattttcatcaacgagaattttcacgactgtcgtacctgtttgagaacgagagttaaccggacaagtgtgccataatctggccgccaggcatatattgctcagatttatggttaaaggataattaattatgcatcccatctccggcgcccctgcacagcctccaggcgaagggcgtaatcctctttccgctgcgagcgagcagccgctttccatgcaacagcgtacggtactggaaaggctgatcacgcgcctgatttcactgacccagcagcaaagcgcggaagtatgggccggaatgaaacacgatctggggataaaaaatgacgcgccgctactgtcgcgccacttccccgccgctgaacagaatcttacccagcgtctgggcgtagcgcagcaaaatcacgccaatcgtcaggtgctttcacagctaacagagctgcttggcgtcggaaataatcgtcaggccgtcagcgattttatccgtcagcaatacggtcaaaccgcgcttagccagcttacgcccgatcaactcaaaaacgtgctgacgctcctgcaacaggggcagctttccattccgcagccgcagcaacgtccggcaacggatcggccattattgcctgctgaacataatacgttgaatcagttggtgacgaagctggcggccgcgaccggcgagtcaaacaaacttatctggcaatcaatgctggaactctccggcgtgaaaagcggcgagctcattccggcaaaacagtttacccatctggcgacatggctacaggcgcggcagacgctgtcactacaacacgcgcctacgctacatacgctgcaggctgcgttaaaacaaccgctggaaccggacgaactcacagcgatcaaagagtatgcccaacacacttatcaaattcagccgcaaacggtgctgaccaccgcccaggtgcaggatttacttaaccatattttcctgcgtcgcgtagagcgggaggcggatgagctcgaaccgctctctattcaacccatctaccgcccgtttgcgccgatgattgaaaccgtgaaaaatctgtctgcgcgaccaggcctgttgtttatcgcgctaataattgtactggcgcttttctggctggtttcttaaccgcgccggaacgataatatcgtcaccaggatgccaaccaccgcggagatcgctcccgcgaggaatacggaaggatagccgtatgacgtggccagcatgcccgccagcgggccggtaacgccgtaggagatatcctgaaacgcggcgtagccgccgagcgccgtaccgcgtacctgtgcaggtacgcgtttcacaacctccacgcccagcgccgggaaaatcagtgaacaccctgccccggtgagcgccgcgcctaccagcgctatccaggccgtcggcgccagccacaagagcagcaaccctgccgtctcaaccagcaatgagacaacggcgaccttcacgccgccaaagcggtccggcatccaaccgaacaatatgcgcatcagtacaaacgcaccgccaaacgcggtcagggtgaatcccgccatcgtccagccattgctgacaaaataaagtgaaataaacgtaccgatgacggcaaagcccacgccctgcaatgccaggcccaggcccggtttccagataagcccgaccacgctccacagtgaaggtcgctcccccgtatacgcaggcactttacgcacggtgccgttgaatgcccaggccagcagcggtaaaaccatcgtcgtccccgccagcgccgcgaagccaaagtggctatggatcagcaagcccaacggcgcaccggccgccagcgcgccgtaaatcgccatcccgttccacgacatcaccttaccggaacgcgttgggccaaccagccccagtccccaggtcagggttccggtcagcagctggctttcgccaaatccgaggatcaaacgcccgacaataagcagcgcgaattttactggcgcggaaaccggcaacagcgcggccaggagccaggcggcgcccgccagcccgcaggcaagcatcccctgtaacgccgatcgtttagcgccatattgatccgccagccgtccggcatagccgcgcgtcagtaccgtcgcaaaaaactgaatgcccacggcgatcccaaccatcgtattgctatagcccagttcgtgatgaacaaaaagcgggatgacgggtaacggcaggccgaccgtcatataggtcaggaaaaccgcaaaggcgatgcggaacagcgaaaaattcgcagacggggtcgttgttttttggctaactgctgtcatgcattactccagaatgcagagtaaggcggggaaaggccacgcccccctctacctgaacgtcaggattaaggtgcgttggataacgttaaacgcttacgcattatcggaaggataatgtagaaagtgaagtctgcctgtgagacgcgaaacttgtcaaccttgaaattgcagccagggtatcaacgtggcggcgtgtcatcaaacagaaagggaaagaccgctttcatccctctcaccttaaaccgtccggtcacctgcttgcgctgttctggcgtcagtaacctgaacatcatctcccagatatcttcaggctccgcttcctgtaaggaaatgggttccggcgtcggttcctctccgctgtcgtccagataacgatgaacataaagagggaaaacagatatatgaaactcctcggcctttgatttaacacgcttacgcctgacaccctctttcccttcgctgtacttatacaaacgttcgcgaaccgcaggctcgcttcccggaaaccccggtaagccaagacattccttaaccgtgaaccattcctttgccatcggtttctttcctttcccctgatgaaataaaaatatttcttctttttcgcgaaattttgctttctttctggcactattctcagagtgaaaaagaaagtaactttctttttctcgcgctaatttttaccttaaaaatatcggtgccgataacacatcttcttaggattacagaatggaaccaaaaagccaagactggcatcgtgcagatattaaaagtgcacttgaaaaaagaggtattacgctcagagatctttctcgtcaggccggtttatcacctgattcactgcgcaatgtctttacccgttcctggccgagagctgaacggattattgcggacgcgctgggcatcacgccgaaagagatctggccgtcgcgctatgatgatatgcaaataaaaaatgatgccgatatcgcagaataatagttaatgctgaataaattggctttaacctatcaatctcaacaattaataaatatttaaacttattatattgaaaatagtaatagcactatctgtcatgcttcccgaatcaaatactgttaaagcattacgtcattgctattacgtattttattaacaggaatcattatgagttgggataaaagaatggcggttaattatgccaaaacgcatgcaggttctcattctcaaggccggtgtgcggaatttacccgaaaggcaattcaggcgggcggtatcacgctggggcatacatatcatgcgaaagattatggcccaatgttaagaagcgccggattcaccgctattggtacctatgaaatgccgcgcgagggtgacgtcatcattattcaaccttacgctggcggaaacccgagcggtcacatggcgatatacgatggcacagagtggtattcagattttaaacaacgcgatatgtgggccggcccgggctaccgggcagccaggccctcatataccatctacaggaagaattaatgaaaacgttctcccttgtcgcgcttatcctgttgctttgtagttgctctgcgcctcatcacgacagtacgcaggccgtgaagcagttctatacctcatggatgacgacgttcacgaacgatgtgaatacccctgacgacaccaccgccttaatgcaacgttacgttgctaaagaggttattcatcgcctggcgctaatacagtccctttatgaacaggagattgtgggggcagattattttatgtatgcgcaggactatgcgccagagtggattccacagttacgggttgggaaggcacaccctttcctcggcggagaaaaagtggatgttctgttggctacagagtcaacgcccatccacctggaagtttatacccgttgggaagagggacgctggaaaatttaccgcgttcgggatgctgacaggggttatgaacagccgatttatgacgcaggcgccatcacccaggctgaggcctggtcagcgaaagtcgcgccggaatataagaagcattaaaaaagggaaccgccatcggtctcttgttcgtaccggagaggttaaagcgcctcttgcatcaggctcttattccgtcgctgaaaacagtaagccgaaaacaacccaggcattatttaaaatatgaagtattatcggtatcattagcccacggcttctcattcgaacaacgcataatatcgatgaaaaaacaaacagataaacaaaagtcaccgcaaagagatattgtgtatgcataaatgcaaaagcgagtgaagtaataataataccggaagctcttgagtaccgaccccaaccgatactgctgtttaataaaaaccctctgaatataatttcctccgccacaggagccagaaagcacatcgccagcgtgttaagaaatttatgaagaaaaaattgccttgataactcggccatccagggttccgggccactaaaagcattgtagagaacggtaaggcacaccagggccagcgccggaacaaaacactccacgaatgataagcgacccaatgataaaaacgggtaatactttgaataaatactccaggcggcaatcgcatagacaaaaacaatactatatataaaaggcgcagccagacctcccaaataaagccaggcataggaaggcgaaaatgaggcaaaaacaaaaatgccgaacaaaccaaataaaacagccacacaactcaaactatgcctaattttatctaatgtattagttggcatttatataatatccatataatttgttgttccctgaatgaaaaaacaggtcgcattagcgacctgtttcattgttgatactacaacgtaatagtcaggcttacaacttacgcatcaccagcgtggcgttggtgccgccaaaaccgaagctgttagacattacggtagtcagttcacgctcggtcgtttcggtcacgatgttcagacccgcagcctgctcatccagctcttcgatgttgatgctcggcgcgataaaaccgtgctccagcatcagcagagagtagatggcttcctgcacgccagccgcacccagcgagtggccggtcatcgctttggtcgcggagatagccgggctgttatcgccaaacacttcacggattgcaccgagttctttcacgtcgcctaccggagtagaggtaccgtgagagttcaggtagtcgatcggcgtgtctacgccgtgcatcgccatctgcatgcaacgtactgcgccttcaccagacggagcaaccatgtctgcgccatcggatgttgcgccatagccgacgatttccgcatagatatgcgcgccgcgcgccagagcgtgctccagctcttcgacaacaaccataccgccaccgcccgcgatgacaaacccatcacggtgcgcatcataggtacgggacgctttttcaggcgtatcgttatatttggtggacagtgcgcccatcgcgtcgaactcacaggccatttcccagcacagctcttcgccgccgccagcaaaaacgatgtcctgtttgcccagttggatctgttcaaccgcattgccgatacagtgtgcggaggtcgcgcaagcggagctaatggagtagttcacgccataaattttaaacggcgtagcgaggcaggcggaaacgccggatgccattgctttcgtcaccacatacgggcccacggctttcaaaccacgcgggctacgcatggcgtctgcgccaaagacctggaatttcggggagccgccgccggaacctgcaatcaggccgacacgcgggttattctgatagacttccggcgccagaccggcgtcggccactgcctgctccatagacagataagcatagatggaggcgtcgctcataaagcgcacgactttgcggtcaatgaggccagtggtatccagttttacgttgccccatacctggctacgcatgccggcgtccttcagctcctgagagaaagtgatccctgaacgtccttcacgcagagatgccaggacttcctgctggttattaccgatgctggaaacgatgcccaggccagtaatcactgcacgtttcattcaatacctctgtaattcgcactatttttaagtttcgattggcacaatagcgtacacttgtacgccgaacaagtccgatcagccatttagtacggaaatttgcgccatcaggcacacatcgttaagatcgcgataccgcccgtcagacgagtaacttacgtgaaacaatacgccatacaacccgccacactcgaatttaacgctgagggtacacctgtttcccgagattttgatgatgtctatttttctaatgacaatggactcgaagagacacgctacgtttttcttggcggcaatcgtcttgcggagcgatttcccgtacattcacatccattatttatagtcgcggaaagcggttttggcaccggactcaacttcctgacgctgtggcaggcgtttgacagctttcgttctgcgcacccacaggcgacgctgcaaaggttacatttcatcagttttgagaaattcccgttaacgcgcgacgatctggcgctggcgcaccaacactggccggagctcgcgccctgggcagagcagctgcaggcgcaatggccgctgccgctcccggggtgccaccgcctattgctggatcggggccgggtgacactggatttgtggtttggcgatattaatgaattgaccgaccaactggacgccacgctaaatcaaacagtcgacgcctggttcctcgacggttttgccccggcgaaaaatccggatatgtggacgccaaacctgtttaacgcgatggcgcggctggcgcggcccggcgcaacgctggcgacgtttacctcggcgggtttcgtccgtcggggattgcaggaagccggttttaccatgcaaaaacgcaaaggcttcgggcgtaaacgcgagatgctttgtggagtgatggaacaacacctcatgccgaccctttccgcgccctggttttaccgcagtggaagcgaaaaacgtgaaacggcgatcattggcggcggcattgccagcgcgctgttatcactggcgttactgcgtcgcggctggcaggtgacgctctattgcgcagatgatcagcccgcccagggcgcttccggtaatcgacagggcgcgctttatccgctccttagcaaacatgacgccgccattaatcgctttttcccgaccgcattcacctttgcccgtcgcctgtatgatgccctgcccgtctcttttgatcatgactggtgcggcgtaacgcagctcggatgggatgagaaaagccagcagaaaattgcccagatgctgtccctggcgctgcccgccggactggcctcggcgctcaatgccgaagaggcggaacaggcggttggcgtgacgacacgctgcggaggaattacctatccggcaggcggctggctgtgcccggaacaattaactcgcgcagtcatcgcactggcgaccgaacagggtttacaaacgcgctttcgccatacgctcacgtcgctcgttgcgcaggagtcgcgctggcaactgcgctttacgtcaggtgaaaccgccagccatgagaccgtcgttctggcgaacggccatcagattaaccgttttgatcagacccagccgctgccggtgtatgccgtcggggggcaggtcagtcatattcccaccacccccgctctctcggcgttgcgtcaggtgttatgctacgacggctatctgacgccgcaaaatccgcataatcagcagcactgtattggcgccagctatcaccggggtgacgaaagcaccgtctggcgcgaagaagatcagcgtcagaaccgacagcgtctgcttgactgttttccggatgcgaaatgggccacagaggttgacgtcagcggcaacagcgcccgttgcggcgtgcgttgcgccacccgcgaccatctgccgatggtgggcaatgtcccggattaccatgccacgctgacgcattacgccgatttagccgataataaaacgtcggcggcgcctgcgcctgtgtatccgggtttatttatgctcggcgcgctgggatcgcgcggtttgtgctcagcgccattatgcgcagaaattctggcggcgcagatgagtaacgagccgattccactggatgccggtacgctggcggcgttaaatccaaatcggttatgggtgagaaagttattgaagggaaaagcggtgaagtaatgggtcagtcaatagcggaaggcggcaagcgtcgccttccggcccacggcgttattgttttgccttgtcgaacaaattgtcccacatcgctttgactaacgcctgatcgcgcggcgacagttcgccggcgccgatcgctttttccagactttggctaacgttggcatagaccgcctcaacggagtggtcatcaccgctctccagctcggcaatggctaacgtcaggtggccacgcaggtatccactggcaaaaagctcatcgtcgctggcgtgctctaccatatcgtcaattaatgccagaatgcgtgattcaaactccgcgatcatcttctttcctcattgtaaacgtggcgctggctttaattaagcgcttccggccacgggaactgttccgccttaagttcgggcgtgtgatagtaattctgtagcgctttgatgaagcgggccggacgttcaggaatgccctgctccagatacgccattacctgcgcatgaacccggcgctgaaacgccacgcgatccggttcaatatcgccttccagattgtcgcaactgacgttaaagggataccccgccgccacgcaaaacaaccagtcgaaagcctgtggcttcacctcaacgtcttcgaattgactttgggtctgcgcgtcgcgtccgtccgggcagtaccagtaaccaaagtcaaccagttcgcggcgcgccttaccggcgatacaccagtgagaaatctcatgcagcgcgctggcgtaaaacccatgcgcaaagacgatacggtggtacggtacctgcgcgtcagcaggaagatagatcggttcgtcgtcgcctttaatcagacgggtattaaattcttcggcaaagcagccgttaaaaatctcaattaactgttcgtaatggtgcgtattgttcattaattcatccccaaccagtggaggatctcctgtccgtggctatcataaagtaacctggcgctcattaccgccgagacaataacgatcatcggtctgataagcttttggcctttgctcaacaccagacgcgaccccattcgcgcccctaaaaactgaccaaccagcatcacgaagcccgtcgcccagatcactttgccgccgatgataaataacagcaggccgccaacgttggaggtagcgttaagcactttggcatgtgccgtggatttcgccaggttatagccacataaggtgacaaacgccagagcgtaaaacgacccggcggcaggcccgaaaaagccgtcgtaaaacccgacgcatcccccggctatcagcgcgaacggtaatccatacaggcggcgctggcgatcttcctcgcccagcttcggcatcaataaaaaatagaggccgatgaaaatcaccaggatgggcaagatctggcgcaaaatatccgcctgcacgtgctgcaccagcagcgcgccgctcatcgagccaatgaacgtcatcagaatattgagcttttgctcggccaggtttaccactttacggcgaataaaatagagcgaagacgagagggagccgccgcacgcctgtaatttattggtcgccagcgcgtttgccggcgacatcccggcggccatcagcgcagggatagtgagcagccctccgcccccggcgatagaatcgataaatcctgccagtacggcgacaaaaaacagcaccaccagcagcagcggggagaccataaacagatcataaaaattgtccatcagagtacatgctcatccagtagcgcctggcaggaaggcggcagcggcggcggtgtcttcttctcaggctttgtggtgccaggttttggcggttcgaaccagctttgcagttcagcgccgcatccatcgcccggcgggggtaaaggttgatcttcgcactccaggctgtcggcagggcagcgtaaacgcacgtgcatatgcgcgcgatgctggaaccaggggcgtactttacgtagccagtcacgatcgtttccggcatcgaggcaaagctgttgtttaatagccggattgacgaaaatacgggtgacgtcattgtcttgtgctgccagtttgatcagactggcgatatccgacgaccagcgcgacggcacgacatgtttaccgtcgcgggacaccagatctaacgcctgcgggcgcaatagctgcgcctggctccagcgcgttttcggcaactgcaagaaaatatccacatcaagcccggtctgatgactggcgtgtccgccattaaagcggcctccggcaggcatccccatgtcgcctatcaggacggttccgagcccccgttgctgcgcctgatgactcaaccgctggataaacatgaccagatccgggtggccgaaataacggcgctgatcggtgcgcatcacctgataattatcggactgtaccggcaacgtgtcggcgccaatgatgcatccgttggcaaagctaccgatagactgggcggcgccggggacaggatgggttattttctgccacggcgtcgccgccaggctggcgctactgacaaaccatgccagcagcgcaatcgcggtttttttcatttcttaccagcgtggaatctctgtctttacatccgcattctgtgcccgatggcgcagcaggtgatccatcagcacgatcgccagcatggcttctgcgatcggcactgcgcgaatccccacacacggatcgtggcgccctttggtgatcatttcgacttcttcacctgcccggttgatcgtacgtcccggcacggtaatgctggaggtaggtttcagcgccatatgcgccacaatgtgttgcccgctactgatgccaccgaggatgccgccagcgtggttgctctgaaaaccctgcgccgtgatttcatcgcgattctggctgccgcgcagcgccaccacgttaaatccttcgccgatctccacgcctttcaccgcattaatgctcatcagcgcatgggcgatgtccgcatccagtcggtcaaataccggttcgccaagccctgccggcacgccgctcgccatcaccgtcactttcgcgccgatggagtcaccctcttttttcagcgcgcgcatcagttcgtccagcgcgtcaagtttgtccgcatcgggacaaaagaacggattaagctcaacctgacgccagtctttaatctccagcggaatgtcgcccatctgggtcaggcagccgcggatttcgatgccgaacttttccgccaggtatttcttggcgatcgcccctgccgctacgcgcatcgcggtttcacgcgcggaagaacgtccaccgccacggtaatcgcgcaggccgtatttctgctcataggtgtaatccgcgtgtcccggacgaaaaacatctttaatcgcgctgtagtcctgcgagcgctgatcggtgttttcaatcagtaggccaatgctggtgccggtcgtcacgccatcaaacacgccggagagaatttttacctggtccggttcgcggcgctgggtagtatagcgcgaggtgccggggcggcgtctgtcgagatcgtgttgcagatcggcctccgtcaacgggatgccgggcggcacgccatcgacgatacacccaagcgccagcccgtgtgattcgccgaaagtggttacgcgaaagagttgtccaattgtgtttcctgccatcacggctccgttatcgttgttgtcgtttgcgtgttttaatctttataaatattgaaatgttcacgggccgcgagcaactgcgctttggtcaacataaagacgccatcgccgccgttgtcaaactccagccaggtgaacggcacatccggatactgctccatcagatgtaccatgctgtttccgacttcacaaatcagaacgccgtcatcggacagataatccggcgcatttcccaggatacgacgggtcaatttgaggccgtcagtgccggacgccagccccagctcaggttcgtggcgatattcgttcggcagatcggacatatcctccgcatcgacataaggcgggttagtgacaatcagatcgtactgaactttcggcagatcgcggaacagatcggaacggattggcgtcacgtgatggataagaccgtgttcttcaatgttatgctcggcgacagccagcgcatccggcgaaatatcgaccgcatcaacctctgcgtccgggaaagcataagcacaggcgatggcgatgcagccgctgccggtacacatatccagaatatatttcggctgttggctaataaggccagcgaagtggttattaatcagctcgccaatcggtgaacgcggcaccagcacgcgctcatcgacataaaattcgtggccgcagaaccaggctttattggtcaggtaggcgaccgggatacgctcgttaatgcgacgaatcactcgctcgacaatgcggtgtttttcgctggacgtcagccgcgcggtccgcatatcttccggaatatccagcggcagataaagagacggcaacaccagttgtaccgcttcatcccacgggttatcggtaccgtgtccataccagatattcgccgcgctaaagcggcttaccgcccagcgcaacatgtcctgaatggtatgcagttcacttactgcttcatcgacgaaaattttatccacgtattcctccagggcatgctcgcattaaattcggcggctagtttgccacgaagacagggataaatcagcattgacgcggcgggagaatacgaaaaatccgttttgaccgttcggatatcctccgggtcgggtaaactaaggcaaaagatcagacgagacccacgaatgaaaaagaaaacatcgctcagcgaggaggaccaggcgctgttccgtcagctgatggtcggcacccgaaagattaaacaggatactatcgtccatcggccactgcgcaagaaaatcacggaagtccctacccgaaggttaattcaggaacaggcggacgccagccactatttttccgatgagttccagccgctgctcaatacggaagggccggtaaagtatgtccgtgaagatgtcagccatttcgagctaaaaaaaatgcgccgcggcgactattcgccggaactgtttctggatttacacggcttaacgcagcttcaggccaagcaggaactgggggcgctgattgccgcctgccgtcgggaacatattttttgcgcctgcgtcatgcatggacacggtaaacatattctgaaacagcaaacgccgttatggctggcgcagcatccgcatgtgatggcctttcatcaggcgccgaaagagtacggcggcgacgccgcgctgctggtgttgattgaagtggaagagtggcaaccgcccgaattaccctgatgcggaattgccggatggcggcgcaagcgcctgatccagcctacgaacagccagcgctgtcgtaggcctgataagcgaagcgccatcaggcagcaaagattaaatcgctttcgccattttcagattgcagggactcatttgccagttgaatgtccccttgccgctttcatcaagcgtaacgttggcaattgcggacgtcgtgaacatcggcggcgtttcgcccggacaaagctcagataccaggtatccgaccagaggtaagtgagaaatcaccagcaccgatccgatctcttcattggccagcgcctggaggtaggcgctgaccagaccgacatcgccacagggcgttagctccggcaggacatccacctgagccggcagattcatacaatcgccgaccacatctaacgtctgttcggcccgaagaaacggactcaccagaacacgttcgatatccactttttgacctttcagccagttcgccatcaggcgagactcgtcacacccacaaggggtcaagggacgaaccgaatcactggcggcatcgagggctgcgtcgccgtgacgcatgataaaaacttgcatattgcaccgcttttgttaaccagtttcaccaacacgcttaccacatgcccctattggctgcggcaaaaatgcggtggccggcattgtgccttatccattcactgaatgaaacgctgttttttacctcaatggcgtaagtatagtcaatccttgattattatttcgccactaaggaggcattcagtgcggattcatattctctttgacctcaatttccctggtcagtttccccattcgtccagaaatgctccctgcgctccgccatgcgcactaattgttcacaaggcgcgtaacgaggaccgtaaagtgcggccaggcgctgtaatgtcgccaccatttcacccggcccgagagcatccatatagcggaacgggccaccgagaaacggcggaaaaccgataccaaacacggcgccgatatcgccatcgcgcgcgctgcgaatcactttttcgtcgaaacagcgcgccgcttcgttaagcattaacatgacacagcgctctgccacctgctgcgcagacaatcgactctgcccttgcacgccaataagcttataaatagcagggtcaacctgttttttgcttttacgccctttttcgccataaagatagaaaccgcgaccattttttctacctttgcgatcgtcattcaaaattgaagcgacaacatttgcaggcgcgctaaaacgttctccatacgccgcctcaagcacaggaataattttagtgcccgtgtcgattcctacctcatccaaaagttggattggccccaccggaaaaccaaattttaccagggcggcgtcaatatgttcgacgcgttcgccttcagtcagcatccgaatcgcctcattgatatatggcgcaagaattcggttaacataaaacccggctttatcactgacgactatcggggttttaccctgttttttcgccagcttaacggtcgtggcgatggtctgcgcggaagtagacgcatgaggaataacctcaaccagcggcattttttcgaccgggctaaaaaagtgcaatccaatcacctgttccggtctggccgcattcgccgcaatatcgccaatcggcagggaagaagtattggaggcaaaaatggtgtgagcagcgcaattttgctccacttccgccaccatctgttgttttaacggcagatcttcaaacaccgcttcaatgaccagatcacgatgactgaaaccacggtaatcggtcgaacctgatatcaacgccaactgtttatcgcgttcgctggctttgatatggcggcggcgtacttttgtttcaagcagatcccagctgtacttcagagcatgattgatcccctgagtatttatatccttaattcgtactggcaagccgcctttacaggccgtaacccaggcgataccgccgcccattaacccgccgcctaagatgcccacgctgttcagcgggccgggcggcgcatcgctaccgggatcttttttcacctcggtactggcaaagaaaatagcgcgcagcgcctgcgattgaggcgtcatcgccagctcgccgaaagcgcgcgcttccgcgtcatagccgctactgctgccctgcgccagtccagtttcaatcacatcaatgatccgctccgtcgccggataattaccctgcgttttttgcgctgtctttttacgcaccaggcgaaataacagcgcgcgccccagcggccccgccaggatacgttcacggaccggtaatgtccgctgcgccaggcgttcttttttagccagctcgacagccgcttccagtaaaatagtttgcggcaccacatcatcaaccagcccggctttaagcgcctgtctggcgcgaagctgtttacctgtcaggatcatatccagcgcggtactgacccccaccagccgcggaagtcgctgcgttccgcccgatcccggtaaaagccctaactgtacctccggcagtccgagaacggttttaacgtcgtcggtacagatgcgccgatggcaggccagcgccatttcaaggccgccccccagacaggcgccgtgaatggcggcgataaccggaacaggcaacgcctggatctccgccatcagttgctgtccctgacgcgccagcgtttccgcttcctgcgcgttttggcagtgacctatcatgttgatatcagcgccagcaataaagttatctgctttggctgagataaaaacaacgccctgcaacgctttattttcccggatctgcttcaggatggcgcgtacctgcgtggcaaactccgctttcagggtgttcaccttttctccagggacatcaatagcgacaaccgcgacattatccagacgcacgttaagcataaaagctgatgtggtagtcattattccgcctccagaaccatcgccgcgccaagaccgccagccgcgcaggccgtgaccaggccaaaacctccgccccgacgccgtaattcatgcaacgtttgggttatcatccgcgcgcccgttgcggcaaaaggatgcccgtaggcgattgagccgccgagcacgttgaatttagcgtcatccacctcccctgtcgcctgcgcacaaccaagcacctcacgggcaaatcgttcgctgcccagcagttgtaagttcgccagagtctgagcggcaaacgcttcatgcatgtcaaaaagcgtcagatcggccatcgtcaacccggcccgctccagcgccagcggcgttgaccaggccggccccaatagcatgtcctgccagacatcaatagcggtaaaggcgtagctgcgcagataaccaagcgggcgcagccccagctctttagcgcgggattcggtcatcagaataacggcggcagcgccgtcggtcagcggtgtactgttggcggcggttacggagccatgttttcggtcaaaagcgggacgcagtttagcgtagtccgccagcgtggaggcgccgcgaatgttgttgtcttctgcaaaggggtttttatacggcggcacataggtcgtcatcacttcttccgccagtttgccctccgcccatgcctgcgcggcgcgctgatgtgaacgatgcgccagcgcgtcctgctgttcacgcgtaataccatacgttttcgccatctgttcggcggtatcgcccatgcgcagaccggtggaatactcagcaacggcgggaggaacgggcagcaggtcgcgtaagcgcagacgagaaaaaagcgtcagccgttggcgggtcgtccgggctttattgacatcaaccagtacccgcgccagggctttactcacgcctattggcagtaccgacgacgaatctgcgccgccagcgataccggcgcgtatcgtgccggccatcaggctttccgccacattcgctaccgcctgaaaactggtggcgcaggcgcggcttacgctataggcatcggtatgaacattcatccccgtacccagcacaatttcgcgcgcaatattgggggcttccggcatttgtactacctgaccaaaaaccagttgctcaatggcatcggctggaatttcactgcgcgccagcagctcgcctaccaccatcttgccgagatcaacagcgggaataccatgaaatgcagtggcctgacgagcgaagggggttcgtaacccactgacaatagcaatgcgatcgccctggcgggtgaccaacggtaaagcctgacgcatagtactcccctgtaaaaaaataaattagtggtctgacctgatcacagtcttaaccaattttttacatttagccaagcagagagaaaagaaagtgggagctaaggcacagtgaagggaagcgacaaaaaaagaaaacgcctccgccagatgatgacggaggcgtcgtgaatgaacggattaacgcaggccgagctggaagatcagcgtttctgcttcgcaggcgaaaacaaaatcaatatccagacgaacgccttcggattcctcggtaaaggttggcgtaatttggcaaggttcagactccacgctacgcgctttttcggttaacgccgccagcgtctcttcagcctctgcgcgggtagcgaatacgcggctgtatgacgcggtgcaatcggagttgtccatgatggttccaacgtccatacagcagcaaaccggggtttcatcagcactgcatttactcattgtagatttcctctgtatttgcacccagggtgccagataaacgatggggatattttacgctcccggcattcgcctctccagtcgttaatggtgggaaacgcgttaagtgaccgaaatcacacttaaaaatgatctaaaacaaaaatcgcgcgatcgggtgaccgttaagcccgccgattttgccagccagatctcgtttctaagatcacaattgaaaaaacttataaacatacttgcaacattctagctggtcagacctatactctcgccactggtctgatttctaagtcgtaccgcagaccctacacttcgcgctcctgttacagcatgtaacatagtttgtataaaaataatcaatgaggttatggtcatgagccagaaaaccctgtttacaaagtctgctctcgcagtcgcagtggcaatcatctccacccaggcctggtctgcaggctttcagttaaacgaattttcttcctctggccttggccgggcctattcgggtgaaggcgcaatcgcagatgatgcgggtaacgttagccgcaacccggcgttaattaccatgtttgaccgcccgacgttttcagcgggcgcggtttatattgatcctgatgttaatattagcgggacatcgccatctcgtcggacgttagatgcggataacatcgcgccgacggcctgggtgccgaacgtccattttgtcgccccgattaacgaccagtttggctggggggcttctattacctctaactatggtctggcgacagagtttaacgacacatacgccggcggctcggttggcggtacgaccgatcttgaaaccatgaacctgaatttaagcggcgcttatcgcttaaatgaggcctggagcttcggcctcggctttgatgcggtatacgcgcgtgcaaaaatcgaacgttttgcgggcgatttaggccagttggtcgcggcacagaatccggcgctggcgccggtcgcgggtcagattcccagcgacaccaagattgcccacctgaacggtaatcagtggggctttggctggaatgccggtatcctttatgaactggataaaaataaccgctacgcgctgacctaccgctcggaagtcaaaattgactttaaaggcaactacagtagcgatcttcccatcgctataaaccgatttaacctgcctatcccaacggcaaccggcggcgcgacgcagtcaggctacctgacgctgaatctgccggaaatgtgggaagtgtccggttataaccgtgtggcgccacagtgggccatccactatagcctggcctataccagctggagccagttccaggaattgaaggcaaaatcgaccgccggcgatacgctctttgagaagcatgaaggctttaaagacgcttatcgcattgcgttgggtaccacctattactacgatgacaactggacgttccgtaccggtatcgccttcgatgacagcccggtaccagcgcaaaaccgttctatctctattccggaccaggaccgtttctggctgagcgccggtacgacttacgcctttaacaaagatgcgtctgtcgacgttggcgtctcttatatgcatggtcagagcgtgaaaattaatgaaggcccttatcagtttgaatctgaagggaaagcctggctgttcggtactaactttaactacgcgttctaatctctttctgaaacggatcaaaaaggtgagcattgcgctcacctttttatttactgccgtttattccgagtcgatctctttgagttcgtcctgaatcgcctgcgcgttcgggttttcctgcggcttgagttttccgccattggcgataaagtcatgacgctggaagtacgcctcgcgcaccataatataaggatcggaagactggcgcagcaaaccatcggagtccagcaactgcgcgcgggtttctatcccttcgatagtccattttcctatggacattggccaggtcaaccacgagagcaccggatacaaggtatccgccatatccccgccatcttcacgcagcgtgaagctgccgtagaacggaagttgcatataaggcccataccccacgccataatggcccagcgtactgccaaagcgatgcggttcaacgcgctgcagcttaggattcgccattcccgcgacgtcaataaagccgcccatccctaataaggtattcaggaagaaacgggtgaaatgcaccataccctgataaggatcgccctgcaggaaatagttcaccatgatcgccggttcttcgaggttgccggtgaaattacttaaaccgttacgcgcaggctgtggaacataatcacgccaggcgaccgcgaccggccgaacaacatacgggtccagcacattaaagttgaagttgtacatggtgcggttaaacccttcaaatgggtctgaacgcccctgctgttctgtaccggaactcgcacacccgaccagcagtgtggttcccagcgccagcgccgacaggcgaagcttcatagatgtctccctgtgaattatggctatcgctgattgccatccatgacggaacgctaccgtatccgcctgtttaggtgtgagcgattttaacagcacgtcaaacgatgtctatatgcgcgatctcattgctttgagcatagcctggtaacgcaacaacgtgacggccctattctaacgaaacagataaaaacgagcgtgatcatttttattttttcggagaatgccccggcctgggtaaatgaaaaaccgctacgctttattaatatgtgttaatcagcagagatcatcatggatagccttaacgacgataaaattaaccggcacagcagtgacctggaagttgaaagcgaagaaaaacaaagcggtaaagagattgaagtggatgaagatcgtcttccttcccgcgccatggcgattcatgaacatattcgccaggatggtgaaaaagagatggaacgcgatgcgatggctttgctctggtcagctattgccgcaggactttctatgggggcatcactcctggcgaaagggatttttcacgtgcagcttgaaggcgttcccggcggctttttactggaaaatctcggctatacctttggttttatcattgtcatcatggcccgccagcaattatttactgaaaacaccgttaccgccgtattgccggtaatgcaaaatcccactctgagtaacgttggcctgctgatgcgcttatggggcgtagtcttattgggcaaccttattggcaccggggttgcggcgtgggcatttgaatatatgcctatatttgatgaagagacccgcgacgcctttgtcaaaattggtatggaggtcatgaaaaatagcccaacggagatgtttgccaacgcgattatctctggctggatcatcgccacaatggtatggatgtttcctgcagcaggcggggcaaaaattgtggtcattattttgatgacctggcttatcgcgctgggcgataccacccatattgtcgtcggttccgttgaaattttgtatttggttttcaacggcacgctgccctggagcgactttctctggcccttcgcccttcccacacttgccggaaatatctgcggcggcacctttattttcgcattaatgagccacgcgcagatccgcaacgatatgagcaataaacgtaaggaagaagcgaggctacgcggcgagcgcctggaacgggagcggaaaaaagcggaaaaacagcgctgagtggcgacggtttaaccagtcaggcggcgctacacttactccggcgaataaaaaacgctatactggcgccgcgttgtccccttagttaaatggatataacgagcccctcctaagggctagttgcaggttcgattcctgcaggggacaccattgatacccaggacattctcttcttgctgcataacctttcgagcggtttccctttcatgttgcttttattgcccctatgcaatatcaccggacatgccatacgttcagcaaaaagtcgtcatcggccggttatgaccgatgacatcccgatgtggtctagaagcgatactgcaaccccgcggtaaccgtatagttattattagctatacctgcggcatcgccaccaaaatacgccgtatcaccgctggttttatctatgatttgcgtaccgcccttaccttcttcatatttactgtaagcaaactcagcaaagatttttgcattactggtaatataatatccggcgtcaatagaagcgccataatatcgtgaattttccgttttttcacggaaggtaagtttgcgcatgtagtgttcgtcattatcatgcgcatttacccagtcgctgtatttaaacagtacattacactcaaagtcattaatacgataatcacccgccagcccgatatagggcatttcgaaacgctggctataacctatgccgcgcacgccatgaggaaaattaccaatatatcgaccattatcataaatataagacccgcctcttgccgtccagctaaaacgggtttcctgatagcccgctgttacgcccgccttgtagttatcgccctgcaataaccaacctttcacgttcaaatcgtattcattagcatagttgacgctggtgtccggatgaattgaacgatcggtccagcctggctgctcactgctcatccagtcatggtcaaccatatgacccgatcccgacgccaaagacgtccagccgcgggcgtccagcgtcatgaacgaatagggttcccatgataaatccccctgcaacgtggcgacattttttattttccaatccagttgactcagcttccgcccggtgtcggtatcataaaccagctccctggatttaccatttaacacacccacggaaagggatgtcgtgacgctatcaggagagacgtccggaataaataaggcagactccgcataaaccgactcagaaaatacggcgatcatcattactgcaatagcatgttttttcatttctcttgtcctcatattcagatgtaatctggagaggtgatgaagttttcatcttgtcaaatcgtcggacaagagtacatttattacgccagagaacttgacgcatttttaccttatattgaagttaagaaatagaatttgatgctcaggtgaataataagcaatctataatcatgatggaatgatttaccattacggtgatgcgacgttatctggctaacgacatcgttgctgatgttgtcagccagattgaaagtaactgtaatatcagaatttataatgctctttacttagaccatattttttcatgcgcagataaagttttttacggggaatttgcaggtactccgccacttcattaattcgtccctgatgaatatttaatgcttcggtaatgatttgtcgctcatactcttcaacgcgccggtcaagcggggtcggctcctgaagaagcaactgcgggttgaccgtttccgccagcggcagcacgccaacagcaaaaagctctgccgcattagccagttcgcgcacattgcttggccaggcgcgtcgcattattcctttcagtaattcccccgctatttccggcactggatgattgagtcgcaggcaggcttttcgaagataatggcgaaataacggctcgatatcatccggtcgctgagaaagagactggcaggcgatttgggtcatggcgaaacagtagtaaagctcggctgcaatctggttagctgccgcctgctccaccagcgaagcgctgccaacgcccaccaaacgaaaaggccgatgctccaggctttgtaaacgcgccagatggtgctgctgttcgcgtgtcagatattcgggatgactcaacaccagcgtgcctccttgcgcctggtcgatgaatgtctccaactgcccggcattctccggcgtaagttcatagcgtacaaacggccctttcgcgttacgccccagttgatggagataacgggcgccagtcatacgtccagtgccatgctcaccgtaaaaccatacggcaatgtccgtttccgccagttgttgtaaccgttgtcgaaactgattcatccactcgctgcgcccaatcagttcaacctgtaacgtctgctggcaatattgccgccgtgcaatgaccgaccggcgctggcgtagcgcgtcttcaattaatatcaacagcttgcccggatcgacgggtttttgcagaaaatcccaggcgccctttttcaccgcatcaaccgccatcggtacatcgccatgtccggtaatcaataagattggcagttgatcgtcatcctgatgaaacagcgtcatcagatcgataccggaacaccccggcatacacacatcgctcaaaacgatcccctcccaatccgcttttacccactctttggcctcgaaaggatgggtaaagccacgcacgcggtagcctgcctgctcaagcatttgggtataggcgtcaagtacatcaacgtcatcatcaatcagcaaaatagaacattcatcattcaacatcatcgacatccgttaccgagaattgcagcaccacgcaagcgttacgcgtcagcgtcgacgccagacgcaggtcgcccttcatttgcgccatcagcgacacgctaatcgacagcccaatacccaacccgacagctttactggtggtaaacggcttgagtaaagagggcaacagcgccacaggccagccagggccgttatctgcaatataaacctccagcgcctctccctgcgtctgccacgtcaccgcgatcaccgcatcatgcgaacaggcgtcaagcgcattcgccagcacattcaccagaacctgctgaatacgcacttcatcgccgctaacccatacggtgtcggttggcagtgaaagcgctccctgccgggattggtggcgcatggctaataactcccatgccgccacaaaggtttggcgcagatcaacgggatacaatggcgtttccagctccgcccgacgggtaaactgccgcagcgaacggataatggcgtcaatccggttaatgagcccttccgctttggtgagcgtatttctcgcctgtccgctctgaccttgttcaatcgcgcgtcccgccgtaaataaatacattgaaagcgcattcagcggctggttaatttcatgcgccagcgtggtcatggtctggccgactaccgccagtttcgccgtctgaatcaactcatcctgcatggcgcgcaggtcggcttctatctctttgcgctcggcgacctcttgttcaagctgcctgcgttgcatattgagctggcccagcgtatgacgtagcaaacgggctatccgtcctagctcatcgcgcccgtaaaccgggatagtcgagtcggttctccccagccctatctgtaccacagcctgattaagcgcggtaaaacgcttcaccagtcgggaacggataaaatagtggttgagtccccaggccagtagcaacgccaggagcgtcgccactaaaataagcccgccgctaacgcgaacaatctgttccaggcgttgattgaacgtctgcatttgctggtgactactacctaactgcgcctcaagcagcgtgcgaaagcgccctagcgtagcctctctggcgcggctggcgtccagtaaggctttttgcgccgcaacataatcgcgcatggtatcgggcatcttattttttaccatcccgatttccaatagttcgtcgatggtttgccgtagcgtgatcgtactgggccagtcatccagcgcacgaatattctcatccgccgttttttttaggttttccagatagcgaatatgggtctccaccagcatcccgtcattattgccggacttgagctcattcaatctgtcgcgcaggtcgtcaacaatctgattttcaattcgcgccagggtatatacctgctgctgctcgttctgcacctcgcgcgaacgttgcaaatactgcgctgcatcgccctgattcgcctcaatttgatcgagcagcgtcccctgctgccaggtaaaatcctgtaccagcgaatttagctccgtggtgaaatcatcatggagccagtcaatgcgagcggaaagctcgctaactttctcccgcaccaaaaacatgttgtagagggcattgtccagctccgccagcaaggtccggctatcctgtaaaatgacggccagttgccggcgctcagcaagctgaagcccctgactgagacgctcaatcttatccagatgctgaataatctgcgtacgtaactgcaaacgtaccgtcgtgttcggcgccagcaaaaattcattgagttgatccacggccagattcaggttcccctcaattaaaaaagcggagtggatgcgaggaaaatattcatcaagcgaatagcgaacctgcgaactttgctcatgccaggaataaaggctgaccatactgacaatcagcgtcagtaatgcgcccgttaaaaatgcgccccgtaaactgttgctgatactgagctgacgaagccgttgcaataatctccccttcatttcagctcttccagtttgtgaatcgccagccgctgattgttcagaaaccagatctgccactccatcattttttgttcggcaaagcttttattatcaaactgcgccagccaggtttcatcttcgctgcttgccgcatccaccgggacgctggtcaataaggctctgatttcaggtaaggggcgtttaagccgcgtttctgcgctgtgcaacgctcgccatgcatctttaagctgcgcgagacgaaaactgatcgcggtatcaaacatgcgttgtaccagttgctgacgcttcaggatcagacgatagttcaacggcggctgggccatcaaacgctgttgttgcgcggcgcgaggattatcggcgctaagcggtgcgacgggatacttaccggtattcgcgtcagccagtatcctttgccctttcggacttaataagtaatgaataaaagcacgcgcttcgtctgcatgacggctgtttttcaacaccgcgacgtaagtgggcgacaccgcagaatacgggaaataggtaaaagcaagattaggatcgttaagtagcaaattagcatagttatcaatgaccggcccggcaacgccaagcccgcttttgattttatccgctacgccgaaactgcgagaggaaatcgtgaccagattacccgagattgccagcagcgttgcccatcctgccgtccagcctttttgctgcaacagcgactccaccatcaaatgattcgtgtctgagcgtgacggactgctcattaatagagcgccctggtaactgggcaggcccatatcctgccagtcggcaggcggcggaagatggcgcgcagcgagcgctgaacggttgatcaatagcccaaatccggataccgctaccgccactgaagttgagcggatagaacgcggcaccagcttctggctggcggcaggcgcgctatccaatagcgccagcttttggtgctcctgaaggtgttgcaacagcatgggggatgacgtcaggatcagatcgacattttccgcattcgccgtatcaagtaattgctctaaagaaccgctggtacggttgagcgtacgaatcatgacggaacccggctccgtctgccagcgctggataatccaggcggtcgcgctgggtgaaaaggtcgttgccatcaccagctcgcggctgtacgcctggcaagaaccgaacattgccgccagccatagcgtaaaagcgcccactctggcgaaacgactacagcatgagaaaagtcgatttgtgatcccgttcataaatatcgatatcacataaagaaaatattgagacaaaacttacccttttatttctgttggcatccagaacaacgttatttgaataataacgggtccgtcgcccgaaaacatcaataaagcgtatcagatcactggcagcaaatttgttaatatccgcacatgctaacgataaaacggccatgccaataattaaagtttcaccacacccttcaggatgggtcaaaaataacctttaaattcacccaattgagtcaattttgacacatttcttcgacttgaattttattgtcactcctttcactctaccgacaaaacctcctgatgttcatctcactataaaatacaggtgactccatgttaacaatattaaaaacagggcaatcggcgcataaagtcccaccggaaaaagtccaggccacatatggtcgatatcgtatacaggcattgttaagtgtatttctgggatatctcgcttactatatagtcagaaacaacttcacattatcgacgccttatttaaaagagcaattggatctcagcgctacgcaaatcggcctgctgagtagctgtatgcttattgcttacggaatcagtaaaggcgtaatgagcagtctggcggataaagccagcccaaaagtcttcatggcgtgcggtctggtactctgcgcgattgttaacgttgggctgggattcagtagcgcattctggatatttgccgctctggtggtcttcaatggcctttttcagggcatgggcgtcggcccctcgtttattactattgcaaactggttccctcgtcgggagcgcggacgcgtaggcgccttctggaatatctcgcataacgttggcggcgggatcgtcgcgcctatcgtcggtgcggcttttgcgatattgggcagcgaacactggcaaagcgccagttatatcgttccggcctgcgtcgccgtcatttttgccttaattgttctggtcttgggaaaaggttcgccgcgcaaagaaggtcttccctccctggaacagatgatgccggaagaaaaagtcgtactgaaaacgaagaatacggcaaaagcgccggaaaatatgagcgcatggcaaatcttctgtacttatgtgctgcgcaataaaaatgcctggtatatttcgctggtggatgtcttcgtctatatggtgcggtttggcatgattagctggttgcctatctatctgttgacagtaaaacacttttcaaaagaacagatgagcgtcgcgtttctctttttcgagtgggcggcgattccctccacgctactggcaggctggctgtcagataaactgtttaagggccgcagaatgccgttagccatgatttgcatggcgctgatttttgtctgtctgatcggatactggaaaagtgaatctttgctgatggtaacgattttcgccgccattgtaggttgtctgatttacgtcccgcagttcctcgcgtccgtacagacaatggagatagtccccagctttgccgtaggttccgccgtcggtttacgtgggttcatgagctatattttcggcgcctcgttgggcaccagcctgtttggtgtaatggtggataaacttggctggtacggcggattttatcttctgatgggcggcatcgtgtgctgcattctattctgttacctctcccatcgcggcgcgctggaactggaacgccagcgccagaatgcgttacataatcaggactcactgcagcttgcggacgcgcaataaacgattagccttcctggggaacagaagcgccgacattgtcggcgctatctattcactggcatcgtatatacccaaaataattcgagttgcttaaaggcggcaagggagtgagtccccaggagcatagataacgatgtgactggggtgagcgacaaatctgccgggagcagatttgaacgtcacgtgcgacggcccgtcagagcgaggcccatcgatgggccgagtaatccgtagccaacacatcagcaacttgaagtatgaagggtatgtactgactaacgcttaccgtatcccaccataaagcgaataattaacccacatgccggtgcgagaaaaagcaataatccgctaacgatgtcatcgccatcctgcaaccatacattgagtaaataaatcagcgcggcaaggataaccattcccgtaaaagaagaaaccgcagaaaaagcccccatcacctgaccgatatagccactcacggcaagtatacttattgcaagaaatgtccataaatagatcatctataatacctcctgtctatggcaaggcttccatatagccttacggtccctctcacttctcctttaagataaaccttatcagcccgtcatttccataacatttatctcacattttatttttttaatcatttttcaatgaccttcgtctgaaataaaattatcactgtaaaaacaatgcattaaaaataatgattagcttatttttgctacgggagaaatatttacgcttcttgataaagaatttctgggcgcgagtaaataactggtggtacattagcctgcctggcgttcatgccctcgtggtttagtactgacttagttttacactccttacgggaaccattgtcgtacatgatggcctaactatacgtaaatcattcaagttaccctgatgagcttactcaagtaagtgcttcggataagcgaacgcaacttgaaggatgatgcgtatttcagagtgtaccgctgcggataatgactcttctgcgatacattattttcgtatctacagaaggtattttatgtttcctcaaagcaaattttcacgcgcgtttttgcacccgcgctactggctgacgtggtttggcgttggcatcctctggttactggtgcagcttccctacccggttttgcgttttctgggcacccgcaccggtaaactggcgcgccccttcctgaagcgacgtgagtcaatcgcccagaaaaatattgaactctgttttccgaccctctcccgggaagaaagggaaaaactgatcgccgagaatttccactctcttggcatggcgctgcttgaaacgggcatggcctggttctggcctgatagccgggttcgcaaatggtttgatgtggacgggctggacaaccttacccgtgcgcaggcgcaaaatcgcggcgtaatggtcgttggcgtgcattttatgtcgctggaattgggaggccgggtaatgggtctctgccagccgatgatggcgacctatcgtccgcataacaatccgctcatggagtgggtgcagacgcgcggtcgtatgcgctcaaataaagcgatgatcggcagaaacaatctgcgcggcattgtgggcgcgctaaaaaaaggggaagccgtttggtttgctcccgaccaggactacggccctaaaggcagctcctttgcgccatttttcgcggttgaaaacgtcgccaccaccaacggcacctatgtactgtccaggctgtctggcgccgccatgttgaccgttacaatggtaaggaaatccgataactcgggttatcgtctgtatattacccctgaaatggaaggttacccggcagatgaaaatcaagccgctgcctatatgaataaaattattgagaaagagatcatgcgcgccccggagcaatatctctggatccatcgccgtttcaagactcgcccgttgggggaagcgtcactctacatctgaaaaaggccgcaaggccttttattttggcatttcgcattgtcataatattcatatcgtaaattactcattcctgcttttagcgataagtctcctgtttacaggcgattttttactgtgtcggcggcgtcgctcaatagcgattcatcactgtcagaaattaaactgtcgccgattcccgacacttgtaagttactaaaagtaaataagaaaatgcctcttgtttcacctcatttttaggcgtacattagcgccgtctggagcgatgacgcgcagaattctgaggtgatgcaggcggtcgaaacacgaataattctcaatttcgtattatccggcatcaactctctataatcaggtaagtgtaagttcatttaggcgtacgacaggtacgcggagagatgaaacgtgaaatatttctttatgggcatttcatttatggtcatcgtttgggccggtactttcgccctgatgatttaaaagtacaatgcaaagaaaaacaggagccatggggctcctgtttgcttttctactccgtgctcgcttcaacgggttttggatgtgacggcagcacgccatcggcgcggaacatcgctttaatccctctgacggcctggcgaatgcggtcgcgattctctattaatgcaaagcgtacatgggtgtcgccataatcaccaaagcctatccctggagaaacgcaaaccttcgcctcattcagcagcttcttggcaaactcaagcgatcccatcgccgcatattgctccgggattttcgcccagacgtacattgaggctttcggcatttcaaccatccagcccgcctcatgcagccccttcaccagcacatcgcgacgacgtttatactgctcggcgatatcgcgcacgcactgctgatcgccttccagagcggcgatagccgccacctgaagcggggtaaaggtgccataatcgtgataacttttaatgcgcgccagcgcgctgaccagggttttattgcccaccataaacccaatacgccagcccgccatattatagcttttcgacaatgtgaaaaattcgaccgccacgtcgcgtgcgccgggcacctgcataatggatggcgctttccagccgtcgtacacgatatcggcatacgccagatcgtgcactaccagcacatcataacgtttagccagagcgaccactttttcaaaaaattccagttcgacgcactgggccgtagggttagatggaaaacccaaaatcatcattttcggtttcggataactttcgcgaatagcgcgctccagctcgttgaagaaatccaccccctcgaccaatggaaccgaacgcacctgcgccccggcgataacggcgccatagatatgaatcgggtaactggggttcggcaccagaaccgtatcgccatgatccagcgtcgccagcattaaatgcgccagtccctctttggaaccgatggtcacaatcgcttcggtttccggatcgatatcgacatcataacgttcctgataccagtgagaaatcgcgcggcgtaaacgcggtatgccgcgagacgtggaataaccgtgcgtatccggacgctgcgcgacggtgcaaagtttttcaacaatgtggggaggggttgcgccatcaggattacccatactgaaatcaataatatcttcaccgcgccgacgcgcagccattttgagttcagcggtgatgttaaaaacatagggcggaaggcgatcgatacgcgtaaagcgacgttcagggcggaagtcagccataatatcctcagattaacgttagcgcccggaccgtccgagcgacgctgccacgatggtggctcctttagaaaatagcctgaaaattttcttcctgtcgagaggctaatgaaaatatttttagcgacaaaaaagaggaacaagcgtaaaaacttactttttaagcgtgtcagttatagcatcaaacaaatcatattattaacaaattgatatcattgaatttacgtaacgtgacgcagccgacgataatttcctgtcaataaaccttatctcaaataatccccttttgattttgtggtttttcctctttaatcaaaagccttactaacgataatggtattcgatcatgtcatattgcggtgtttttcagggatatttccccgaaaatgaggatcctttccggcaagctgccgcgatgaaaccgtaaataaggcagcgaaccggatacgtatagtaaaataaatccctgttttcgcctgactaaccgccatgacgtgatgactcaacgcgctggtgtttgacctttcgctcagcaagagtaaagtgaaataattcagacagttgaagcattcatgcacaggaaaggcaatgaaaaaaaccgcgtgaggcacgcggtttgagactgacaagagaatgtttaattgcctgataacgctgcgcttatcaggcctacagatgacacacttttgtaggccggataaggcgtttatgccaccatctggcttatagaatatgacctaatgtctggcgcagatgcgcgccggaacctaacaagccaggattatcatggacaatcagatagaccggaataccgtgtacataatctttaaagcggcctttatcttcaaagccaccacggaagccggacgctttaaaaaattccaggaagcgcgggacaataccgccagcgatataaacgccgccaaatgtccccatggttaacgccagatcgccgccaaatcgccccatgatgacgcaaaagagcgacaacgcgcggcgacaatcgatacagctatccgccagggcgcgttcggtaatatctttcgggcgcagattttccggcagacggttgtcggacttaacaatcgcccggtaaagattcaccagccccgggccagacagcacgcgctcggcggaaacgtggccaatttcggcgcgcaatatttccagaatcatagcttcttcttcgctattaggcgcaaaatcgacatgcccgccttcgcccggaaggctaatccaacgcttatccacatgcaccagatgcgccacgcccaagccggttcccgcgccatacaccgcaataggtttgccgtctaccggttcgccgccgccgaactgaattaaatgctcttttttcagcatcgggatcgccatcgacacggcggtgaaatcgttgatgatttccagatggctaaagccgagattttttttcatttccgcaatagaaaaagcccaggtatggttagtcatcgctacccagtcaccggtaatcgggcaggctatggcgatacaaccatcttccacgctgacgctatgctcatcgagataaacgcgcaccacggcctcaagactgggataatccaggccggaatacgttttggcctgcgagatttctccactggcgatatcacacagggcaagacgcgcattcgtgccgcctacatctcctactaaagcatactttgtcattcttctactgctccgctaaagtcaaaataagtctttgtcacactgtaaattcatgggggcataacaacaacggccatcaggctgactgcctataaatatagatcttcatcacagaattactttcttgtttcagcaccaattgcagcaatgccgtcgggcaggctgtgcaaaataggtatacgaccccgtgtaaggaagagattatgttccacccgcgtgcccgaacgatgctgctgctgtcgctccccgcgctgattattggcgtagcgtcaagcctggttttaatcgctgcgatgaaagtcgcgtcggtttttcagcaatttctttggcaacgactgcccaccagcatcggcatcgcttatgattcgccgttctggatagtgggtatgctcacgctaaccgggatcgtggtgggtttgattatccgttacagtcccggacacgctggccccgatccggccatcgaaccgttaatcagtatgccggtctcgccatctgcgctacccgggctgcttctcgccttaatcatcggccttgctggtggggtaagtttggggccagagcatccgataatgacaataaatatcgcgctggcggcggctttcggctcccgcctgtttccgcgtatcacggcgttagactggacgattctggcctcagcgggcaccatcggcgcgctgttcggcacgcccgtcgccgcagcgctgattttttcgcaaacacttagcggctctaacgatattcccatgtgggatcgcctgtttgcgccgttaatggcggcagcggcggggtcactcaccaccagtctgttctttcatccgcatttttcgttacccatcgcccattacacgcagatgcggctggtggacattgccagcggagcgatcgtcgcggcgatcgccattgccgccgggatggtcgccgtctggtgccttccgcgtctgcatgagttgctgcaccgcctgaaaaatccggtcctgattctcggcattggcggttttatactgggtattctgggcgtcattggcgggccgcttaccctgtttaaaggcctggacgaaatgcaacaaatggcgtttagccagacgctgggcgcgggagattattttaccttagccgtcgtcaaactcgccgcgctggtcatcgcggcggcgagcggctttcgcggcgggcgcatttttccggctgtgtttatcggcgcggcgctggggctcatgctccatgcccatgttgaggccgtacccgcggcgattaccgtctcctgcgcgattcttggcttagtgctggtagtgacgcgcgacggctggctcagtctgtttatggcggcagtcgtcgtaccggataccaatctgctgccgctgctctgcattgtgatgctccccgcctggctattgctggcgggaaaaccgttgctggccgccaaccgtcacgaaccctaatccggcgcagcgggggccattatcccccgttgcgggcttccagcgcccgggtcacggtacgcagtaattccggcagatcggcttttggcaacatcacttcaataaatgacagacgttgtgggcgcgccaaccgttcgaggacctctgccagttggatagcctgcgtcacccgccagcactccgcctgttgcgccgcgtttagcgccggtggtatctgcgtccagttccagctcgcgatgtcgttataccgctgggccgcgccgtgaatggcgcgctctacggtatagccgtcattgttgagcagcaggatgaccggcgcctgcccgtcgcgtaacatcgagcccatctcctgaatcgtgagctgcgccgcgccatcgccgataatcagaatcacccgccgatcgggacaggcggtttgcgcgccaaacgcggcgggcaaggaatagccgatagacccccacagcggctgtaacacaacttccgcgccgtcaggaagcgacagcgcggcagcgccaaaagctgctgtcccctggtcgacaaggataatatctccgggtttgagatactgctgtaaggtttgccagaagctttcctgggtcagttctcctttatcaatccgcactggctgtccggcggaacgcgtcggcggcggcgcaaaagcgcattccaggcacagttcgcgcagcgtagacaccgcctgcgccatcgggaggttgaaccaggtttcgccgatgcgcgacgcgtaaggctgaatctccagcgtgcgttccgccggtaattgttgggtaaatccggccgtaagggtatcgacaaaacgggtgccgacgcagataaccctatcggcgtcctctatggcctgacgcacttctttgctgctggcgccagcgctataggtgccaacgaagttcgggtgctgttcatcaaaaagccccttccccatcagtagtgtcgcatgagcgatgggcgtttccgccatccagcgctgcaacagtggtcgtaaaccaaaacgcccggcaagaaagtcggccaatagcgcaatgcgccgactgttcatcaggcactgacgggcgtgataacgaaaggccgtctccacgccgctttgcgcttcatgcacgggcaacgccagcgcctgcgtaggtgggatggccgtttttttcgccacatcggcgggcaacatgatgtatcctggcctgcgtgcggcaagcatttcacccaacacgcggtcaatctcgaaacaggcgttctgttcatctaatattgcgctggcagcggatatcgcctgactcatgcgataaaaatgacgaaaatcgccgtcaccgagggtatggtgcatcaattcgccacgctgctgcgcagcgctacagggcgcgccgacgatatgcaagaccgggacatattccgcgtaactgcccgcgataccgttaatagcgctaagttctcccacgccaaaggtggtgagtagcgctccagcgcccgacatgcgcgcatagccgtccgcggcataagcggcgttcagctcattggcgcatcccacccaacgcagggtcgggtggtcaatcacatggtcaagaaactgcaagttataatcgcccggtacgccaaaaagatggccaatgccgcatcctgccagtctgtccagcaaatagtcggccacggtataggggttttgcatgacagctttccttctgacgttgatattatgttgagtattaaggaatgccgatggctgtccagcacggtggggatgaaagcctggaaaacaatgtttacagcggcaaacagtaaaagccggataccgcctggcgagtgtaaccgtatacactatttattcacgccacagggggaaaggtcatgatttatcagcccgatgagaatcgttatcacacaatggagtatcgtcgctgcggacgcagcggcgtcaaacttcccgctatttcgctggggttatggcacaacttcggcgatacgacacgggtagaaaatagccgggcgctgctgcaacgcgcgttcgatctgggcattacccactttgatctcgccaataattatgggccgccgccgggctccgcagaatgcaattttggccgcattctgcaggaagattttttaccgtggcgtgatgaattgatcatctccaccaaagcgggctacaccatgtgggatggcccttatggcgactgggggtcacggaaataccttatcgccagcctcgatcaaagcctgaaacgtatggggctggagtatgtcgatatcttttatcaccatcgtcccgatcccgaaacgccgcttaaagagacgatgaaagcgttagatcaccttgtgcgccatggcaaagcgttgtacgtggggatctctaactatcctgccgatctggccagacaagctatcgatattctggaggatctcggcacgccttgcctgattcatcagcctaaatattcgctttttgagcgttgggtagaggacgggctgctggcgctgttgcaggaaaaaggcgtcggtagtattgccttctcgccgctggcgggcgggcagctcactgaccgttatttgaatggtattccggaagattcccgcgcggcgagcggaagccgtttccttaaaccagaacagattaccgccgacaaactggaaaaagttcgccggttgaatgaactggctgcgcgacggggtcaaaaattgtctcagatggcgctcgcctgggtgctgcgtaacgataacgttacctcggtactgattggcgccagcaaaccgtcgcaaatcgaagacgccgtgggaatgctggccaatcgccgtttttcagcggcggaatgtgcagaaattgacgctattctggagggccggttttagcaaaaaatgctctccttcatgatttaagagttaaggcgatgaaacaaatctttactgctttgtaatattgcattaacaggccggcgacggctcgatcgtgaaggagagaaagtatgttcaggtcactgattctggcggcagccttgctggcttttacaccgcttgccgcgaatgcgggcgaaatcaccctgttgccctcaataaaattacagattggcgatcgcgatgattacggtaactactgggacggtggtcgctggcgcgaccgggattactggcacaaccattatgaatggcgtaaaaatcgctggtggcgccatgacaacggctatcatcgcggctgggataagcgtaaagcgtatgaacgcggttatcgggaaggctggcgcgatcgcgacgatcatcgcgggcgaggccggggtcacaaacatcatcactaagcctcctgctgaataacagcccgatgacgcccacgcatcgggcctgctatctttctgtctttatgacaaccccatcaccgttccaaccagcaaccagatattcagggcgacgaccagcacgacaattatccagccaacctgttttacccgccgcgtgttcaccagctcgcccattagcgtagcgttactggtgaaaatcaggagcggcaccagcgccagcgcaataccaaaactcagcagcacctggctcatcaccagaattcgggtagggtccagccccatcaaaatcacaataaatgagggcagcatggtaatggtgcgccgtacccacagcggaatgtgaaaacggacaaacccttgcatcaccacctgccccgccagagtccctaccacagtggaggaaagccctgcagctaccagactaagaccaaacaccgttgccgccgcatggcttagtaacggttccagcgtcaggtatgcctgatcgaggtcggcgatgccggtgtggccgctaaaatgaaacgccgccgcggcggtcgccatcattgccagattgacaaaaccggcaatcgtcatagcaatagcgacatcccatttcgttgctgagtaccgttgttgccgtgttccgccgtgcagatgctgcgttaatgacgagtgcagataaatcacgtgcggcataatcgtcgcgccaagcacgccggcggctaagaatacggcttccgggttcggtagcgccgggataaccattcctttgccgagctgcgccatatcaggctgagagaaaaacagctccacaatgtaagcggcggcgacaaaaagcagtaaaccgccgatgactttttcaagcggtttttgaccgcggcgctgtaacattaaaatcagaaacgtcgcgataccggtcaataccgcgccctgtaataaagagacgcccaggatcagcttaaaacctattgccgcgccgataaattcagctaaatcggtggccatcgcgatgatttccgcctgtacccagtaaaaccagactaccggacgcggataatggtcgcgaatttgctccgccaggttcttgccggtggcgatcccgagttttgccgagaggatttgaatcagcatcgccatcaggttcgcccagaccaccacccagagtagctgatagccaaagctggcgccggcctgaatattggtcgcgaagttaccaggatcgatataaccaatcgcggcaatgaacgcaggtcccattaatgcgagccttagcttgcgcgccgcccgtccgctgctattctctacgcgattgtcagtcatcttttgcctcaaaaacatagcctttgctatgtttcatgctatgtttattgataatgattatcaagtgcatttcaatgggtacgggtgattactttgatagtgtgaaacgatagaccgatacgatgacgacctgtatcagaacagtttggcttaacattacaagattagcacactgatataacttttcattttcatattcagtacagtaaaagtgtattacagatcactaattttgaatctcgtcacaggtccttattatagtgtgtgttggatctcgttttctttacggctgttgcatagaatgtgcacgaaaattaaacctgcctcatatttggagcaaatatggaccgcgtccttcattttgtcctggcgcttgccgttgttgcggtactcgcactgctggttagcagcgaccgtaaaaaaattcgcattcgttacgtcattcagttacttgttatcgaagtattactggcctggttcttcctgaactcggatgttggccttggcttcgtaaaaggtttctccgagatgtttgaaaaactgctcggatttgccaacgaagggacaaacttcgtctttggcagtatgaacgatcaaggtttggcgttcttcttcctgaaagtattgtgcccgatcgtctttatttccgcgttgatcggtattcttcagcatatccgcgttctgccagtggtcatccgcgctattggttttctgttgtccaaagtaaacggtatgggcaaactggagtcttttaacgccgtcagctcgctgatcctcggccagtctgagaactttatcgcttataaagatatcctcggcaaaatgtcccgtaaccgcatgtacaccatggcggcgaccgcaatgtctaccgtttccatgtctatcgtgggcgcgtatatgaccatgctggaccctaaatatgtggtcgcagcgctggttctgaacatgttcagcacctttatcgttctgtcgctgatcaacccctatgtcgttgatgccagcgaagaaaatattcagatgtcgaacctgcatgaaggccaaagtttcttcgaaatgctgggcgagtacattctggcaggttttaaagtggcgattatcgtcgcggcgatgctgatcggcttcatcgcgctgatcgcggcgctgaacgcgctgttcgcaacggttaccggttggttcggctacagcatctccttccagggcattctgggttacatcttctacccggtcgcatgggtaatgggcgtaccgtccagtgaagcgctgcaggtaggaagtatcatggcgaccaaactggtttccaacgaattcgtggcgatgatggatctgcagaaaatcgcctctaccctctctccacgcgctgaaggcattatctccgtcttcctggtgtccttcgcgaacttctcttccatcggtattattgcgggcgcgattaaaggcctgaacgaagagcaaggcaacgtggtttcccgttttggtctgaaactggtttacggttctacgctggtgagcgtactgtccgcctctatcgcggcgctggtactgtaagtctgggtttaatgcagaaaccggggagctatccccggtttttttatgccgcttatttgcctaacgggcgcgggcggccaatcagatatccctgcaaactgtgtacgccaagctgcaatagcagatcgcgctgcgcaggcgtttcaacaaactcagccacgacgctcaacgatttcgctttcgctaaatcagtgatggatttcacaatcatcgcatccagggagtccgtcagaatatcttttacaaaacaaccgtcgattttaatgatgtccgccttgaggcgttttagccgttcatagtttgcataaccggtgccgaaatcatcaatggcgatttttaggccgaacttacgcagttgattgatattgtgcatactgatttcggaatgagagaaggcctgttcttcagtaatttcgatgatgaccgaagcaggcgggacgccatagcgtttaaaaagctgcataatgcgcgacgccgtctctttttgcagcagcgtcaacggcatcaaattaaccgaaaaacgtgccccctgttccgctgaaggatgcgcggacagccattgcaggagcgcttccatcacctgcatatcaaaccgtatgctcaggttaaactgggcgataagcggaatgaactgattcggcatcatgataccgtcgtcgcaccgaagccgcgtcagaatctcgtcatacccttttccctgcgcgtcgcgaatgggttgcgcatacaaaaccagcgcgccgcgctccagcgcctgacggattttctgcaaccgcagcacccgttccgtcgtctgcccggaagcggcttcaatactctgggtcagtgcaagcacccgacggtgcgaacaggattgctccgccagccagcttaattgccccaacagcggttgcaaggtttcctggcgaccatcgaatgttccccacgatgcgccgtattccatgtccagaccggtattgttccagtaaattttgcggttattaagcacgttgagcatatattgcaggcgggcttccgtctccggtcctgtcagcaccagcaataattcactgcccggcagatggaaaattttctccttttccagcagcagcggctgcaacatgcgaaacacctcgcgttcgcaatgcacgcgcatctgcataccgtaatgacggctcagaaattccaggttttccatgcgtaaataacacacgctttgcccggcatcctgtaaaagaaactgctccagcgcacgcaggttaggcagttgcgtcaacggatcggtcaatgcctgcgagtgccattgtcgattcaaccattcgctacgctgattaatccgcgccatgtacaacaaacaaatactaaaagaaatgagaactgaaaggataaatgccagcgaatattctgaacccacgccctgcagaaaattgcggttatagctaagcaggaatagcgcagtgagagcccaactaaaattcaacagcggatagctgattttccccacgccgatggtaaatccaatgaacagaactggcaccagatagccagcaatatactttgtctcgaaaggcgtacacagcaccgctaatagcgtcgccagagtggcaaaccagagaagcgtaaacaggcgtttttctttggcgagataaggagcgacatccctccgccagaaaatacgcatatagtgcgggctgactatcatccgcagcggataatagaaaaagagggtaaaaataagcgcggcagaaatcagactcaataaatcgacaatcgagaaaatagcggtgccggtgccaaagaaggtagagatggtcaccgggaaagccaggtagtgccccgccagatgcatactgatttttataccaaacggcgtcattaaccctaaccagaaaacgcgtagccagatgccttggttgggtattccgtagcgccagcgcgcgcccagctgccagcgtacgatagcgcaaaccagcagcacgggaaacgtttggcaaaatagcagcaccatcgcctgtggcagaggtaaatgaaaattccattcattagtcaacatcattccgcctaccatcggcgcgacgccacggcggccaaataaaaacagcacggaaaacatgacgcagagcggtagccaggccagaaagatatagctggaatcaattgtggcgcggggagaaatgagacgagatagcagaatagccggaacggtcaggcagaaggccagtaagaatatttttatattttttaatacgttacacttatccggcattgctttaatgctcacatcattatataaggcgcatgaataataagtatattcgcattatgaagcaatctaacaaaagctcatattgaccgcaaaagcagcggcaaacaaacgcacctgaagagcagatcagaggccataaattttgtgacaaaaagcaaaaacccccgcttttcagcgagggtttgaatgttggtggagctaagcgggatcgaaccgctgacctcttgcatgccatgcaagcgctctcccagctgagctatagccccatagtgcttttacgtatacgccaaatttatcgggagtaaatttggtggagctaagcgggatcgaaccgctgacctcttgcatgccatgcaagcgctctcccagctgagctatagccccactacgtaaagcttgtcgagttgacgggcggcatcatatgaattccctcggcatgtgtcaacggcaaaatgaacttgccgaattcaatcgctgaaaaagcattcaaataaaggacattgcggcacaactcgcattcagtagttaaacacgtcacggtttcgactaaaatggtgctataaaatgaaccactaattaaccccacgactattcagggaatcgttatgttcaaggaacggatgacgccagaagaactcgctaatctcaccggttacagccgacaaaccatcaataaatgggtacggaaagaaggctgggcaacatcgcccaaacctggcgtccagggcggtaaagcccgtctggttcatgtaaacgaacaggttcgtgaatatatccgcagcgctgaacgttcagttgaccatcacgcagacacattcacgcctgccagcaacgcatcgcttgaagcgctgctcatgacgctcgccaaagagatgacctcatccgagcagaaacagtttacctctctcctcgtgcgtgaagggattaccggtttgttacaacgcttagggatacgcgatagcaaataatatgaaaagattacgcagtaaaatgaccactgaagagctggctgaatgcctcggcgtggccagacaaaccgtcaatcgctggatcagagaacaacactggaaaaccgaaaaatttcccggcgtcaaaggcggacgcgcaagactcatccatattgatgccagcgtgcgggagtttattctcaatattccggcttttcgcaaactgcctgcgttttatcaggcggaagaggctttcgcagaatatgcgaacgcggcgcacagtcatgcttatcgacaaattattgatgccgttgaaaatatgtctgctcaggaacaggaaaaactggcgctgtttttatcgcgggaaggtattcgcggatttctgacgcgtttaggtatcaatgaggcggactaacaaataataaacggcaggcgtctgccctgccgtttattctgtttcagctggcgttactgctgactttcacgctcggcgataaagcccagcgctttgttgatgcgctcaatgctgcgggttttaccaatcgcatgtacggtgacatccagcgcaggcgactgcccggcaccggtcacagccacacgcagcggcatccccactttacccatccccacttccagctcatccgccgtggcctgaatcgcgtggtggacgttttctgctgaccagtccgtaatcgccgacagcttgtcgcgcaccacttccagcggctgacgcgccaccgggcggaggtgttttttcgccgcatcggcgtcaaactcgctgaagtcttcatagaagtagcggcagctctgcgccatctctttcagagttttgcagcgctcgcccagcaacttcaccagttcagcaagctgcgggccgttacgggtgtcgatattttcctgctcgatatgccactgcaaatgcgtcgccacatattccggcgccagcgtattgatatagtggtggttcagccacagcagtttatcggtgttgaacgcgctcgcagacttgctcaccgcaccgagggagaacagcttgatcatctcttcgcgagtgaagatttcctgatcgccgctggaccagcccagacgcaccagatagttcagcaacgcttccggcagataaccgtcatcgcgatactgcatcacgctcaccgcaccgtgacgtttagacagctttttaccgtcgtcgccgttaatcatcgacacatgcgcgtacatcggcaccggcgcgtttaacgctttcagaatgttaatctggcgcggagtattgttgatatggtcttcgccacgaatcacatgggtaatttccatatcccagtcgtccaccaccacacagaagttgtaggttggggaaccgtcggtacgacgaatgatcagatcgtccagctcctgattgctgaattcgatcgggccacggatctgatcatcaaaaataacggaaccgtcctgcgggttggcaaagcgcaccacgcatggctcatcgtcggcatgatgttcgtgactgtgacggcaacgcccgtcataacgcggcttctcgcctttcgccatctgatcttcacgcagttgctccagacgctctttagagcagtagcatttataggctgttcccgcctccagcatctcgtcaatcaccgcgttatagcgatcaaaacgtttggtctggaaatatgggccttcgtcccattccaggttcagccagttcataccatccatgatggcttcaatggcttccggcgtggaacgctcaagatcggtgtcttcaatacgcagcacgaactcaccgccgtggtgacgtgcgaaaagccaggaataaagagcagtacgcgcgccgccgacgtgcagataacctgtcgggctaggcgcgaagcgagttttgattttcatgaaatggccttacgtttataaagatgccgacaaccggcaaatcctggaaagatgaatagccttgtattctatcactgtggcttgattcctcaatgttgatccggtcagaacgctgcgctttgctatttccgtatagaaatcatgcagtgcggggtaattcacgatcgttttgtttaattttacgacgaacaaacaaaaactttagaaaatgcgttgactcattttcaactctccctataatgcgactccacacagcgggggtgattagctcagctgggagagcacctcccttacaaggagggggtcggcggttcgatcccgtcatcacccaccaactactttatgtagtctccgccgtgtagataagaaattgagaagtgggtgattagctcagctgggagagcacctcccttacaaggagggggtcggcggttcgatcccgtcatcacccaccactttctcgccagctaaatttcttattgtgaagtaccgaagtgggtgattagctcagctgggagagcacctcccttacaaggagggggtcggcggttcgatcccgtcatcacccaccacttcgggtcgttagctcagttggtagagcagttgacttttaatcaattggtcgcaggttcgaatcctgcacgacccaccaatgtaaaaaagcgccctaaaggcgcttttttgctatctgcgatatggaagattcgaacctgtcgcaggttcgggtcttgcctgatgcgctgcgcttatcaggcctacagacgacaccgcacacgtaggccggataagacgttagtcgccatccggcacagacattataccgtcaacgccgccaccagtttctccagtgctggcgttgcctgctgctggtcatacacaatatacaaatccgccggaatacgttcctctaacggacggaacaccacacccggccagctcatttgcgcatagccatcagccatcaacgtaatcccgatccccatactgatcatcgccaacaccgtttgcggctcaaccacttcccgaataatcattggcgaaaagcctgcctgttggcatacacgttgtaaaaatccccaatcagaatgtacggaaggcaacgtaacaaaatattcattgcgcaacgccgccaacggcacagaatctctggatgccagatcgtgatcttccggaactgcaaccatgaatgcagattcatgcaaacgtatgctggtaaaaccgactgctggttcgatagccatacgccagatccctgcatcaagttcccgacgctctaacaacgccatttgcataccgggagacttttcgcgaaaaagtacttcaacattgggatttgctttcaaaaagtgacgcatcgcaggacgcattcttccccacagcgccgtaccaaccacacccagttcaatgcgccccgcttcaccgcgaccaatctgctccactcgcgccagcgcctgatttgcactggctaacaagcgacgtgactcctccattaaaactttcccggcatgggttaatgcaacgctgcgggaatgacgaataaacagcaatgtacccagttgctgttcaagttctttgatatggatactcaagggaggttgtgacatatttaaccgggcagcagcccggccaaaatgcaattcttctgcaacagcgaggaaataacgtaatagctttagatcaatacgatgggctcgttccatcactatcgcactccaggaataagggataacgtctggaatttaccatattacctagtaaaaaatagatttaacgacaagatacccaatatacataaatacaatagataataccccgggtaaaacatttggtgcgggaataggtatacggcataaagtaaaaaatgcgccaataccaaatccaataccggaggagagaataatttctttcatgctgtgtccttgttcataaaaatggactggcgaacatcctctcgccagtcaaataaaattaatgtgctaatgatttggtcgacagtttttctggatggtgctgatatttaaagaacaatgcaaaaataacggccaatgccagagcgtaggcggcaaagaccagccagatagtttgccaatcttttacgccatcaatagaaaaataatccacggccataccgcttaaaagagacccaatccacgcccccacgccgttaaccatggtcataaatagcccctgcgcgctggcgcgaatacttgagtccacctcctgctctacaaatactgaccctgagatgttgaagaaatcaaatgcgcagccataaacaatcatcgacagcagcagtagcacaaagccaaacggggatggatcgccaaaggcaaagaagccgaaacgcagcgtccacgccagcatactcatcagcattaccgttttaataccaaagcgtttaaggaagaacggaatggtgaggataaagcccacttccgccatctgcgaaactgaaagcaagatagagggatacttcaccacaaagctgtcggcaaactcaggattacgggcaaaatcatgcaggaacggattaccgaagacattggtaatttgcagcaccgcccccaacatcatcgcaaacaaaaagaagattgccatgcgtggatttttaaacagaacaaaagcatccagtccgagcttactggcaagcgtggtgttcgccttcttctcggctaccggaattttcggtaacgtcagcgcatacagggccagcaataacgatgcgccagaagcgatgtataattgcgcactgctcagttccagccccatcaggctcaccgtccacatcgcaacaataaaacctattgtgccgaaaacgcgcacaggcggaaatgacgttaccggatcctgacctgctttcgccagacaggagtacgaaacgctattggataatgcaattgttggcatatacgccatcgcattcaccaacatcacccagaacatcgtctggggatcggtaacggtggtggcgtacaataacgcccccgcgcaaaccagatggcaaagcatgtaggctcgctcagcgcgcagccatttatcagcaatgatccccataatacccggcatgataatcgctgccagtccttttgagctgtagaccataccgacattcgcgccggtaaaatccagagtgttgatcatgtaagagcccagggtaaccagccagctcccccagataaaatattgcaagaacgacatgacttttaagcgggacgtaatacccattttttattccttgccgtgagataaagccccaatacggggccgtagtcattgtgtttaggccagcttacgtaaaaagccgcaaatcagatttataaagttctgccgggaaagttcagccgccgccagcgtttgcgcatgggagagttttacatcgcccagcccttccgccagattggtgatcgctgagacggcaacaactttgaggccacaatgacgtgcgctaatcacctcagggacaacggacattccgaccacatcgccgccaataatctgcatcatgcggatttctgccgccgtttcgaagttcggacccggataagaaacaaatacgccttcagtgagggtgaatccctcctctgccgcaacggactgaagcatggcgcgataatctgcgtcataagcattagccagcgagaagaagcgatcgccataacgatcatcgtttggccccaccatcggcgtaccgggcatcgtattaatgtgatcgctaagcgcaaccaggctacccggccccacttccggacgcagagatcctgccgcattggtgcagaacaacacttcacagcccagtaatttcaacgtgcgaatggcatcggtcatcaccgccattccacgcccttcataaaaatgtccacggcctttcatacaggccaccggaacccccgccagatggccgagcaccagttcaccagcatggccgtgtacggtgctgacgggaaatcccggcaatttctcgtaagaaatggctaccgcatcttcgatttggtccgccagagcacccaacccggagcctaaaataaacgcaactcgcggggtaaatgccggtttatgtgcatgaacaatatcaacacaatactcaggattatgagaaaaaagagcgtgaggcataagtttccttgttctatcggatttaatttgactcctttttataacgaccatcgccccttgctgaccaatacacttttcacgtgtcatcaatagccatttaatatcgataaatttagatcgcttctgtattaatacagagggaaaacagtattggtttttgcttgcaattcatattaacaatatgccgctttcatatttataaattgcctctttttaattaacccattaataattatcggcatagggaaatatgctatgaaaaaaattcttactctgacgctttcttctttactcattattcccgcactcacccatgcggaatttaaaggcgggttcgccgatatcggcctccattacctcgactggacatcagacaccacggaaaaaaccagtaaaaaatcccataaagatgattttgggtacctggaactggaaggcggagcgaattttagctggggagaaatgtacgggttcttcgactgggaaaatttttacaatggccgccacgctaaaccaggcagcgaacagcgttacacctttaaaaataccaaccgtatttatctgggcgatacaggattaaacctctatctccatgcctacgggacgtacggttcacctcatcgcgctaatttccatgatgacatgtttctctatggtttaggctataacttcacaggtaacggttactggtttaaacccttctttgccaaacgttataccgatcagacctactacacaggcgataatggttatgtattaggttgggtggccggctatagcttctcgttgggtagtgagaaattcagcgtaacgaactggaatgagtatgagtttgaccgcgatgcgtcctacgctgcgggcaatggcgggaaagatggcattaatggcgcagtagcgctgtggtggaatgcgactcctcacctgaccgcaggagtacaatatcgttacgctgataataagttaggagaatccttcctgcaggatggcattatttactccatcaaatacctgttttaacacacagccctgtcaaaaatggcagggcaagaccgcacctcacacacggacagatagatatttatagctgatacagcggatctttcgccctcgcggcggttaattcgctggcctgggtacgcaccacgtcccacaacgcctgcgccgccgtggagagcgatcggttttttcgccgcgccagcatgagctgcctttcaactacgggcgtcagccgtttaacctgtaagtggctgccctgcgggagcggtaacgccagcgcgggcagcacgctgatgccgattcccgcttccaccattggaaacagcgtggccgggtgaccaatctcctgcacgatatccgcctcaatagcaaaatgggccagcgccgcatcaatcagcggtcgactgccggaagcataatcctgtaagaccagcgaggcctgtttaagatcctgccagctcacccattcctgatgcgccagcggatgatcctggcgacacaacagtaaaaaaggctctgataagatggcttcacactgtaaatccaccgctgcgccgggatcgataacgatgccaaaatccacttcaccctggcggatgctctccagcacccactgctgcggacgatcgtgcaatacaaaatcaatagcgggataaagtgaattactttgggcaatgcattgcggaataagatgcgcagaaatggtttggctcgcggcaacgcgcacggtgccggttaattgtgtccctactctgcctgcatcgcgcagtatgctgttcagttcatcaagcacccgctccagacgcgtcgccagttgttgccccgcctcggtcagcaccacctcacgcgtagtgcgatccaacagtctgacgccggtttgccgctccagctcttttacgctatgactgaccgcagactggctcagtccaatcctgtcccctgcccgactgaaacttttggcctgggcgacggtaataaaaatacgcagttgacgcagtgaatagttcatcgactagattcatatatagatgcaataaatcaattttatttctcaaagcgaaaaacgcaaaatagctgcaccgactttcaggagtttttatgaaactttttcgtatccttgaccctttcacgctgacacttatcaccgtggtactactggcctcttttttcccggcggaaggtggctttgtgcctgtcgttgaaggcattacgacagcggctatcgctctgctgttttttatgcatggcgcgaagctttcgcgtgaagcgatcatcgctggcggcagccactggcggttgcatctgtgggtcatgtgcagcacttttgtgctctttcctgtcctcggcgtactgtttgcctggtgggcgcctgtcaatgtcgaccctatgctctacagcggctttctgtatctgtgtattttgcccgccaccgtgcagtctgcgattgcgtttacttcactcgcgggcggtaacgtcgcggccgcggtgtgctcagcgtctgcgtccagcctgctgggcattttcctgtcgccgctgctggtcggtctggtaatgaatattcatggcgcgcagggcagtctggaagaggtgggcaaaattatgctgcaactgctgctgccttttgtgctgggacacctgtctcgcccgtggatcggcaattgggtcgcgcgcaacaaaaagtggatcgcgaaaacggatcagacctctattctgttggtggtctactcggcgttcagcgaagcggtggtcaacggcatctggcacaaagtcggctggggatcgctgctgtttatcgtcgtggtcagcctcatactgctggcgatcgtcatagccattaacgtctttgtcgcccgtaaatgcggcttcaataaagccgacgaaatcactattgtcttctgcggttcgaaaaaaagcctggccaacgggatcccgatggccaatattctgtttccgacgtcagtgctgggtatgatggtattaccgctgatgatcttccaccagatccaactgatggtctgcgcagggctggcgcggcgctacaaacgccagaccgagaagttacaggcgcagcaggaaagccgcgccgcgaaagcttaaagcgggcgtttcaggggctgtaccagttgcgtcagcccctcggttttaatcagcagcgtgatttgcatcaactcccccagtttacccgccggaaattgatctttacgggcaaaccacagcaaatactcttccggaaggtcgatcaatcgacgtccctgatatttgccaaagggcatcacggtgttggcgatttcaaccagctgctctttttccatctcaggcacccagtaagcggatcatttccgcttcatcaatcacggtaatacccagttcctgcgctttggccagtttggagcccgccgcttcaccggcaatcaccagatcggttttcttcgatacgctgcctgccactttcgcgcccagcgccactaaacgcgctttagcgtcatcgcgagacatctggctcaggctaccggttagtaccacggttttaccggcaaacgggctatcgatctcttgcacattaatgactaccggcgcgggccagtgaaccccttccgccagtagctgcccaatcacgtcacgattactctcttcggcaaaaaagttaaagacgtgcgtagcgaccacaatccccacgtcaggtactttctgcaactcgtcaatggtggcggcctgcagcgcctccagcgtaccgaaataagccgccagccccgccgccgtcgcttcacccacttcacggatgcccagcgcatagagaaaacgcgcaaaggtcgtcgttttggatttttccagcgcgttaacaacattttgcgcggactttggccccattcggtccaggccggtcagtttacccgccgtcagacggaacagatccgctggcgtatggacatactccctttccaccagttggtcgatgatcttatcgcccatcccgtctacatccatcgcccggcgcgacacaaaatgtttcagcgactctttacgctgcgcgccgcaaatcagcccgccggtacaacgggtaacggcttcgccttcaacgcgctctacgtccgatccgcacaccggacagtgcgttggaaacacaatcggacgcgtctcttcagggcgttcggacagaaccacgttgaccacctgagggatcacatcgcctgcccgacggataaccaccttatcgccaatgcgcaagccaagtcgctcaatttcatcggcattatgcaacgtggcattgctgaccagcacaccagccacctgaaccggttccagacgcgccaccggcgtaatcgccccggtacgcccgacctgaaactcaacgtcgcgcacaaaagtcatctgctcctgagcaggaaatttaaacgccaccgcccagcgcggcgcgcgggccacaaagcccagcagttcctgcaaagccagcgagttgaccttaatcaccacgccgtcgatatcaaaaccgagcgtagggcgatctttttcgacgttgtgataaaaatccagtaccgcctggggagaatcgcacagcgtcacgcgatcgctgaccggtaacccccacgctttaaattgcagcaaacgtcccagatgcgtatccggcaactcgccgccttccagaataccgacgccgtagcagaaaaatgttagcggtcgcttcgccgtaatacgcggatcgagctgacgcagcgaacccgccgccgcgttacgcgggttagcaaacactttgccgccagtgcggcgcgcgtcttcattgatcttttcaaacccggcctgcggtaaaaatacctctccgcgaacttcaagacgcgccggaatgttatcgccgtgcagctttaacggaatggcgcgaatcgtgcgcacgtttgaagtgatatcttcaccggtggtgccgtcgccacgcgtcgcagcgctcaccagcacgccgttttcatacagaatgctgaccgccagaccatccagctttagctcgcagcaccagatgacattttccgtgctttttagacgatcctgcactcgcttgttaaacgccaggaagctttcttcatcaaatacgttatcgagcgacagcatcggtacttcatggcgaatctggttgaatgccgtcagcggcgccgcgccaacgcgctgcgtgggcgaatccggcgtgataaggtccggacgttgcgcctccagctctcgcagttcccgcatcaggcggtcatattcggcgtcgggaatctctggcgcatccatcacatgatacagatattcatgatggcgaagcgtggttcgcagttctgtcagttgttgttcgattggttccatatcacaccatcaatgataaaaaacccccgacaggcgggggttacgttaaaaatgtcacacctgcgttaacctcaggcgttagcgtccatcacctcgcggatgcggtcctgatattcgcgcagtttctgcggcgtcatcatccgacgctggtcatccagcacgacgccaccgacctcatcagcgatatgctgcgcggattgcagcatcagcttgaaattctgcagcgcatcgccgtaagacggtacctgcataaagatagtgacgccaggcgtagtgaagtccgtcatttcaggatcgaacgttcccggattgaccatattcgcgagactgaacaaggccgggccgctgccgtccgggctcaaatgacgatggaaaatattcatatcgccaaatttaaagcctgactgctgaatactgttcagtaacacttcaccattaagctcgctgccatgatgggccgcgacgttcataatgatgaccgcctctttacgctgcggtttttccacaaccggcgcttcttccactaccggttccgcctcaaccacaggttccgcaggctggaaggtttgcgctgatggcggcggcgcgggctgcgcaacaggctgcggcgcttgcgacggcggtgcaggctgctgttgcggcggctgtaccggcggcgcagatggctgaacctgctgaggctgcggcgcaggttgaaccggttgctgaaccggctgttgcatcggcgcttgcggctgcggcggcgccgctggacgcggttgcgcagacgcataaggcggctggtactggtgttgcggcgactgacgaggggcatcatgctcctgcgactggccgggggcatgatttacgcggtgaacacgaacttcacccacgccttcgtcttcttcgtcatcgtcgtcatacgagtcgtcgtcgcgtttcgatttcatgcgttttagtggacgatcgcggaacatagaagatcgttctttacggctggtccagaaaccatgtaccagtaaagcgattatggcgatcgcgccaacaatgattaatatcagacgcaaatcctgcatcattatattctctgttgttctaacaccttgccaccacggcaaacatttactcactaagagtatttgccgattacgtcaagtgcaagtgtactgttggctttcgcagcataaagatgaaggaaaatgtgctttttgctgttttttcgaacatttccgaactatccaccgtctgataaccgggtaagatatcccacgtttacccagggctttaagaaaaaggagtatgtcctgaatatggtttcatcatccacaaccgtaccacgtagcggcgtctattatttctcgcaaggatggaagttagtcaccctaccgggaatccgccgctttgttattttacctttgctggtcaacattgtgctgatgggcggcgcattttggtggctgtttacccagcttgacgcctggataccttcgttgatgagtcatgtgccggactggctgcaatggctgagctatctgctgtggccgattgcggttatctctgttctgctggtctttggctattttttctctaccctcgccaactggatcgccgcgccgtttaacggccttttagccgaacagcttgaggcgcggttaaccggcgccacgccgccagatacaggcatactcggcatcatgaaagatgtaccgcgcattatgaaacgtgaatggcaaaagctggcgtggtatctgccgcgcgctattgtgctgctgattctctattttattcctggcattggccaaaccatcgcgccggtgctgtggtttttgttcagcgcctggatgctggcgattcagtattgcgactatccgtttgataaccacaaagtgccgtttaaaacgatgcgcgccgcgttgcgcacgcagaaggtggcgaatatgcaatttggcgcgctcaccagcctctttacgatgattccggtgcttaacctgttcattatgcctgtcgccgtctgtggcgcgacggcaatgtgggttgattgctggcgtgctaagcacgcgttatggaaataacgtaaaaatgtataaataagagatggcttatgctgtctcttattccatactgataaccattatttcccatcagcatatagatatgcgaaatccttacttccccatatctggctggaaggtatgctgggaaggtatcccaatttcatacagttaaggacaggccatgagtaagatttatgaagataactcgctgactatcggtcatacgccgctggttcgactgaaccgtatcggtaatggacgcattctggcaaaggtggagtcgcgcaacccgagcttcagcgtcaagtgccgtatcggcgccaacatgatttgggatgccgaaaagcgtggcgtactgaaacctggcgtggaactggtggagccgaccagcggcaacaccggtattgcgctggcgtatgtcgccgccgcgcgcggttacaaactcaccctgaccatgccggaaaccatgagcattgaacgccgcaagctactcaaagcattaggcgcgaatctggtgctgaccgaaggggcgaaagggatgaaaggcgctattcagaaagccgaagaaattgtcgccagcgatccgcaaaaatatctcctgctccagcagttcagcaaccctgccaacccggaaatccatgaaaaaaccaccggcccggaaatctgggaagacaccgatggtcaggtggatgtgtttatctccggcgtcggcactggcggtacgttaaccggcgtcacgcgttatatcaaagggacgaagggtaaaaccgatcttatcaccgttgcggtagaacccactgactccccggttattgcccaggcgctggctggtgaagagatcaaaccaggcccgcataaaattcagggtatcggcgcaggcttcatcccgggcaacctggatctgaaactgattgataaagtggttggcatcaccaatgaagaagctatttctaccgcgcgccgtctgatggaagaggaaggtattctggcaggaatttcttccggcgccgcggttgctgcagcgcttaagctgcaggaagatgaaagctttaccaataagaatattgtggttatcctaccttcatcaggtgagcgttatctgagcaccgcgttgttcgccgatctctttactgagaaagaactgcaacagtgatgccagcatgttaaaaacgcgtaaaaaagcacctttttgggtgcttttttgtggcctgcttcaaactttcacctcacctggcattgattcaccctgccggaactggtatttaaccagactaattattttgatgcgcgaaattaatcgttacaggaaaagcgttagctgaatcgattttatgatttggttcaaatcttcctttcgcggcataatgtttaatgacgagcgaaacgtcagcggccataagttgccagcaacggattgcgtagaacaccttttgtgtcgcgtcccgtttacgccggcgctaacaatacaggctaaagttgagccgccaggctagactttagttccacaacactaaacctataagttggggaaatacaatgttccagcaagaagttaccattaccgctccgaacggtctgcacacccgccctgctgctcagtttgttaaagaagcaaaaggcttcacttctgagattactgtgacttccaacggcaaaagcgccagcgcgaaaagcctgtttaaactgcagactctgggcctgactcaaggcaccgtcgtcaccatctccgcagaaggtgaagatgagcagaaagcggttgaacatctggtcaaactgatggcggaactcgagtaagtttttttccgggttcttttaaaaatcagtcacaagtaaggtagggttatgatttcaggcattttagcatccccgggtatcgctttcggcaaagcactgctgctgaaagaagacgaaatcgtcattgaccggaaaaaaatttctgccgacaaggttgatcaggaagttgaacgttttctgagcggtcgtgccaaggcatctgcgcaactggaagcgatcaagacaaaagctggtgaaacgttcggtgaagaaaaagaagccatctttgaagggcatattatgctgctcgaagatgaggagctggagcaggaaatcatagccctgattaaagataagcacatgacggctgacgcagccgcacatgaagttatcgaaggtcaggccactgccctggaagaactggatgacgaatacctgaaagagcgtgcggctgacgtacgtgatattggtaagcgcctgctgcgcaacatcctgggtctggccattatcgatctgagcgcgattcaggaagaagttatcctggttgccgctgacctgacgccgtcagaaaccgcgcagctgaacctgcagaaagtgctgggcttcatcaccgacgcgggcggacgcacgtctcatacctccatcatggcgcgttctctggaactgccggcgatcgtaggtaccggtagcgtcaccgctcaggtgaaaaacggcgattatctgattctggatgccgtaaacaaccaggtttacgtcaacccgaccaacgatgttattgagcaactgcgcgccgtccaggagcaggttgcgaccgagaaagcggaactggctaaactgaaagatctgccggcaatcacgctggatggacatcaggttgaagtttgcgccaacatcggtaccgttcgtgacgttgaaggcgctgagcgcaacggcgcggaaggcgttggtctgtatcgtactgaattcctgttcatggatcgcgacgcgctgccgacggaagaagagcagtttgccgcctataaagcggtcgctgaagcgtgcggctcgcaggcggttatcgtccgtaccatggacattggcggcgacaaagagctgccgtacatgaacttcccgaaagaagagaacccgttcctgggctggcgcgccgtgcgtatcgccatggatcgcaaagagatcctgcgtgaccaggttcgcgcgattctgcgtgcctccgctttcggtaaattgcgcattatgttcccgatgatcatctctgttgaagaagttcgcgcgctgcgcaaagagattgaaatctacaaacaggaactgcgtgacgaaggtaaagcatttgacgaaagcattgagattggcgtgatggtggaaacaccggctgcggcgacaattgcgcgtcatttagccaaagaagttgatttctttagtatcggcaccaatgatttaacgcagtacaccctggcagttgaccgtggtaatgatatgatttcacacctttaccagccaatgtcaccgtccgtactgaacttgatcaagcaagttattgatgcttctcatgcagaaggtaaatggactggcatgtgtggtgagcttgcaggcgacgaacgtgctacacttctgttgctggggatgggtctggacgaattctctatgagcgccatttctatcccgcgcattaagaagattatccgtaacacgaacttcgaagatgcgaaggtgttagcagagcaggctcttgctcaaccgacaacggacgagttaatgacgctggttaacaagttcattgaagaaaaaacaatctgctaatccacgagatgcggcccaatttactgcttaggagaagatcatgggtttgttcgataaactaaaatctctggtttctgatgataagaaagacaccggaactattgagattgttgccccgctctctggcgagatcgtcaacatcgaagacgtgccggatgtagtttttgctgaaaaaatcgttggtgatggcatcgctatcaaaccaaccggtaacaaaatggtcgcccctgttgacggtaccatcggcaaaatctttgaaaccaaccatgcgttctctatcgaatccgatagcggcattgagctgttcgttcacttcggtatcgacaccgttgagctgaaaggcgaaggcttcaagcgtattgctgaagaaggtcagcgcgtgaaagttggcgatccggtcatcgagttcgatctgccgttgctggaagaaaaagccaagtctaccctgactccggttgttatctccaacatggatgaaatcaaagaactgatcaaactgtccggtagcgtgaccgtgggtgaaactccggttatccgcattaagaagtaattcttgccgcagtgaagaatggcgcctttgggcgccatttttttgcctgtacttgcgccgccatccggcgatggtgcagtgcactgcctgatggcgctacgcttatcaggcctacaaggttgcgaacatttcagcgccaatccacgggttacaactgcgaggtcaccgggcgaaagcacttctcgcgcatcaggatcttcatcccatccgggccactctccagcatcctgcgttcggaatcggacacttgcagctcgcactgatagccgccagtgatgccaaacatcgctcgcgccacgcagatatcttccagcgcgtccagcccgctcgtttcaaaatgccccacgatacgtccctgctggcgaaccaccagccgataactcttcatcgcgcctcccctgccggcggcagaattaactcatcacagccacactgctgtgtccaggtcatcacctccagcacgcgctgcgccgcatcttttgccgcggtcgtcagttttttcccctgcacaataccgctgaccagctcggcgcagaagagatctcccgtcccttttaactccgtcgccacccgcggatgggcaaagacctccacgacctgcgcagtaacgaccgcaaccgttatggtctccagagactcgcccggcgcgctggtgataaccacccatttcaacgtatcggaaagcagcgattgcgccgccgccaccgcctcttccagcgtgcggcacggtttaccactcagcatctccagctcaaatacgttcggcgttagcccctgcgcctgcggcaacaaatgcgtgcgataagcctgcggaatttccgcctgcacatacattccactgtcggtatcgccaatgaccggatcaacaagaatacacacctccggatgcgaagcccggatcgccattagccacttcgaaagcaagacaatttggtctgcgctgcccatgtaaccggtggtaatcgcttttaattcacgtagcgcatcgcgctcattcaacgccgtaaggtagcctgcaaaccactcggcgggaataatgccgccataaaaggttttatagtgcggcgtattgctgaatagcaccgtcgggaccgccgtcacgcgtagtccctgcgctttaatggccggaacagcgatactgttgcctacgctgccgtacacgacctgtgactggacggcgacgatatcggtctgtaatgcccgatggttgtcgtcgaagagcactgactgaatatcactctcttgtcccataaaattttcctctcgctggacagcaggctaccgcctcattatcattgtcatatgctaaaattcattttgtcataggtcaataatgatcgacggaaaaaccgctaacgaaatttttgacagtatccgtcaacacattatcgccggcacgttacgggcggaggattcgctcccgccggtacgggagctggcaagcgaattaaaggtgaaccgcaataccgtcgcagcggcgtataaacggctgataacggcgggactggcgcaaagtttaggccgcaatgggacggtgattaaaggcagtccgtctcccgtagcgctggaaggcggcgatccacatacgcctctgcacgacctttccggcggcaatcccgatccgcagcgtctgcctgaccttagccgttattttgcccgtctcagccgcacgccgcatctctacggcgatgcgcccgtttcccctgaactacacgcctgggcggcgcgctggctacgggatgccacccccgtcgcaggcgaaattgatatcaccagcggagctatcgacgccattgaaagactgctttgcgcgcatctgctgccgggcgacagcgtcgcggtggaagatccctgttttttaagcagtatcaatatgctgcgctatgccggttttagcgccagcccggtcagtgtggatagcgaaggaatgcagcctgaaaagctggaacgggcgctaaatcagggcgcgcgggcagtgatcttaacgccgcgcgcgcacaaccctaccggctgtagcctgagcgctcgccgtgccgctgcgctgcaaaatatgctggcgcgttaccctcaggtagtggtcattatcgacgatcacttcgccctgctttcttcgtcgccctggcagccggttattgcgcagacaacgcaacactgggcggtgatacgctccgtttccaaaaccctcggccccgatttacgtcttgctattgtcgccagcgacagcgcgacctcggcaaaacttcggctgcggctaaatgccggtagtcagtgggtcagccatctgttacaggatctggtctacgcctgcctgaccgaccctgagtatcagcacaggctgacgcaaacgcggctgttttacgccgcccggcaacaaaaactggcccgcgccctacagcaatatggcatcgccatttctcccggcgacggcgtgaatgcctggctcccactggacacccatagccaggctaccgcgtttacgttggcaaaatccggctggctggtacgtgagggagaagcctttggcgtaagcgcgccgtctcacggtctacgtatcacgctgtcgacattaaatgacagcgagatcaacacgctggcggctgatatccatcaggcgctaaatcgctaacaggagaaaataacgtgcgagttcattttgttgtccatgagtcgtttgaatccgctggcgcttatctgaaatgggctgaagatcgcggttataccatttcatggtcgcgcgtctatgccggagaagcgctaccgcccaatgccgatgagttcgatatgctcgtggtatttggcggtccgcagtcgccgcgcaccacccgcgaagagtgcccgtactttgactctcgcgccgaacagcacttaattaatcaggcagttacggcccggcgaatggttatcggcatttgtcttggttcgcagctcattggcgaggcgctgggcgccgctgtgtgccaaagtccggaaaaagagattggtcactaccctattacgctcactgaagccggtctgcggcatccgcttatcgcccactttggctccccgttaaccgtcggccactggcacaacgatatgccaggactcaccgatcaggcgaccgtgctggccgaaagcgaaggctgtccacgtcagatagtgcagtacggtaattttgtctacggcttccagtgtcatatggaatttaccgtcgaggcggttgaaggattaatccaacattcgcagcaggagctggccgacgcgcaagggaagcgttttatccgctcggtcgccgagatgcgcgcatggaattaccagcaaatgaatgaaaagctgtggcgttttctggatgaactcacgctggcgcactcacagaaataaccacaccaggagtgcaacttattacccggctaacggtctgaggtgcagtgattattgcatgaaaaaggattttaccatgaagaaaattgtttgcgccgtcgttgcgctcctgctgaccctacccgcctgggcgaagctgaacgcccatgaagaagcgcgcattaacgccatgcttaatgcgctggcgcagaaaaaggatctgacattcgttcgtaacggtgatgcgcataactgcgaggaagccgtatcgcacctgcgcttaaaactgggtaacacgcgcaatcgtatcgacaccgccgaacagtttatcgataaagtcgcgtcgtcgtcgtccatcaccggaaaaccctatatcgttaaaattcccggtaaaagcgatgaaaacgcgcagccttatttacatgcgcttattgcggaaacggataagaatgttgagtaagaaaaaatcataatgccaggcgtgttactgtggttttttaaaggcgttatcgcgcttctgttagcgtttgctgtagggttaatcgtttactattatctggaaattcgtcccatagcccagaccgcattacagagcgcctctttctggttgtccgaatcgccgcagacgcgttttttgcgccgcgctgcggccaaaatacatcccaaatcttatactgccagattgctctatacccaagctggcgtggatgggcatttcaggatcgcgatctgggtgttctggttggacagcctgtaccgcgacgacgagctgtatgccatgatgctggcgcaagcgtattatggccgggattcgcagggtaacgcggtttacggtacgaaaaatgcggcgttaacgttatttcacgtaccagtgacagagatggcctgccagcaacaagtacaactgatttatatgtttaaagcgccgtcactttaccggcctggttcagccaggctggtagaaagcagcaagcattacatgacgctttgccaggaacaaatacaacaataagaacaacagacgagcttttattataaaaggcggcggtaatgcgctggcgcacatagaaaatcggcaggatattcccgcttgtcaaaggcgccgttgcctgtgtttatcccaatcagctgaactcattagtttaaatccctgccccctggctgaaatgctcttcaccaaacacgccggtcgaaaggtaacggtcgccgcgatcgcagatgatcgccaccactatcgcgccgggcgtggctcgtgcgacgcgtaacgcgcccgctaccgcgccgccggaactcacgccgcagaaaatgccttcacgaacggccagttcacgcatggtgttttcggcatcattctgatgaatatccagcacctcatctaccagcgaggcgttaaaaatgcccggcatatattccgcaggccagcgtcgaatgcccggaatactgctgccctcttccggctgtaggccaacgatggtgaccggtttttcctgctcgcgcagaaaacgcgacacgccggtaatggtgccggtcgtgcccatgctggagacaaaatgggtgatgcgacctgacgtttgccgccagatttccgggccggtggtcgtgtagtgggcgtagggattatcaggattattaaactgatcgagcagtttgccctcgcctcgttcagacatagcgagcgctaaatcgcgcgccccttccattccctgctctttagtgaccagaatcagttccgcgccataggcccgcattgccgcccgacgctcctgactcatgttgtctggcatcaacagcttcatgcgataacctttcagcgcggcgatcatcgccagcgcaatgccagtgttgccgctggtcgcttcaatcaggacatcgcccggtttaatttccccgcgcttttccgcctcgacaatcatcgatagcgccgcgcgatctttcaccgatcctgccggattattgccttccagcttgacccagatttcactgccgttatccggccccagacgttgtaatttgaccagcggcgtattgccgatggtttgttctaatgtattcacgttttcagctcgtaaaaaagcccggtatgcgtagcgccaccgggcgataactatacaaattaacctatcaggccgattgcgccagagcaagttcctcttcacgcgtttcaatacgctggtcgccgttatacagacgcgctttttgcagtccaacaaacaaacgctcgccgcgaaccggaacatcctcacccgccatcaccaccgtcagcggatcgtgataccaccccagcggctgtaccactaactgtgtatagtgacctttcgggctggcctcaatgacctgtactggtagaggagaatccaggctggtgcggcggctaatatccacctcccacggacgcaggaacagatcgaccggcccctggtacgcgggcgtataacccagcggccagcgatgcgcgccaacgtgaaactgcccgccgcggacggtgcctgtcaggcggttcacctcgcccataaactccagtacgaagcgggttgccggttcacgccacacccgatccggcgcatcagcctgttcgatattgccctgactcatcaccaccacccgatccgccacttccgtcgcctcttcctgatcgtgggtgacaaagacgctggtgaatttcagttcttcatgtagctggcgcaaccagcgacgtaactctttacgtacctgggcatccagcgcgccaaagggttcatccagcagtagaatttgcggttccacggcaagcgcgcgcgccagcgccacgcgctgtttttgtccgccggaaagctgggcggggaagcgatccgcgaggtgcgccagttgcaccatctccagcaattgcgtcactttcgttttaatcgccgccgcagttgggcggtcgcgtcgcggcagcaccgtcaggccaaaagcgatgttgtcaaacaccgtcatatggcgaaacagcgcatagtgctgaaacacaaaaccgactttacgctcacgcgcgtgcaggcggctaacgtccgtaccgtggaaacgaatatgaccgctggactgatgctccagcccggcaataatgcgcagcagcgtcgttttgccggaacctgacggccccaacaaggcaaccatctggccggaaggaatatccagcgagatatcattcagtacctgagtgcgaccaaaggatttcttaattctggcgatctcaatgctcatgattttcctcctgttgcgcgcgtttttcctgattctccagacgccattgcaacatgctcttcaaaaacagggtaataatcgccattagcgtcaacaatgcggcggcggtaaaggagccgacggtgttgtagtcctgctccagtaattcaatctgtaacggtagcgataacgtttcgccgcgaatcgagccggacaccaccgacaccgcgccaaactcgccaatcgcgcgggcgttggttaacaccacgccgtagagtagcgcccagcgaatattcggcaacgtcacgcggcgaaacatttgccagccggatgcgcccagtaaaatcgccgcctcatcttcctgactgccctggctgagcatcactggcaccagttcgcgcaccacaaacgggcaggtgacaaaaatagtgaccagtaccatccccggccaggagaacatcatttgcaaattatgctcatccagccagccgcccaacgggccgttggaaccataaaacagcagataaaccagaccggccaccaccggcgagacggcaaagggaatatccagcagggtcagcagtagctgacgtccggggaagttaaagcgcgtcaccagccacgccagcagaatgccgaacaccagattcaccggcactgcgatcaaggcaatcaacaccgtcagccagatggcgtgcagcatgtccggatcggccagattttgcagtaccggcattaaccctttgctgaacgcctgcacgaagatgtaaatcatcggcaccagcaggataaacgccgaaaccagcatcccgacgccaatcagaaaccattttccccagttaatgcgggggacgtcgtatcgcttcaattgagtcacttccgccattaatgacctaccacacgtcgaccaaagcgactttgcaaggtattgatagagaacagcagcagcaaggatgccgcaaggatcaccgaggcaatggcgctagcggccgggtaatcaaactcctgcaagcgcacaaaaatcatcagcgaggtcacttctgttttccaggcgatatttccggcgataaaaatcaccgcgccaaactcgcccaggctacgggtaaaagagagcgccacgccggcaatcagcgcaggcgacagctcaggcagcacgactttgcgaaaactttgcagccgggtggcccccagcgtttgcgccgcttcttcatattccggccccagctcttccagtaccggctggacggtgcgcaccacaaatggaatactggtaaaggccatcgccaccgcaataccgagccaggtataggtcactttgatatcaaactgcgcaagaaactgaccgtagaaaccgttcactgagaacagcgaggccagcgttaaccccgctaccgctgtcggcagcgcaaacggcagatccatcagcgcatccagcaacgtgcgccctggaaaacggtagcgggttaaaatccacgccatcagcaggccaaacacgccattaaaaatcgacgctacaaatgccgccagtagcgtcactttataggcagccaccacctgagggttggtcacgacatcccagtattgcgcccagctcatctgtgagagctgcatcaccagcgcgctcaacggcaacagtaggatcaggcagacaaacagcaaactggtgccgaggcttaacgtaaagccgggcagcacgcgtcgggaagaaacggcaagcattacttacgccccgccgccaacagtttgtccagctcgccgccgctggcaaagtgcgttttcatcacttccggccaggaaccaaacttttcttccacgcggaacagttcggtctgcgggaatttatctgcttgcttgcccatgatttccgggttattcacgcggtagtagtaatgggtgatgatggtctgcgcctgcgggctatacagccagttcaggtaagctttggcggctttttctgtgccgttggcctgcacgtttttatccacccaggcaaccgggaattcagcaagaatgttcgttttcgggatcaccacttcaaatccctgggcttcatattgtttgcggatattgttcacttccgactcaaaactaatcagcacatcgcccagaccacgctcggcaaaggtagtcgtagcgccgcgaccgccggtatcaaacacttcgacgtttttcaggaactgggtcataaactgttcggttttggctttatcgccgccgtccgcgttatccgccgcgccccatgccgccagatacgtgtaacgggcgttgccggaggttttcgggttagggaaaatcagcttcacgtcggaacgtacaagatcgctccagtcgtgaatatttttcgggtttcccttgcgcaccaggaaacccatcgtggaatagaatggcgaactgttgttcggcagacggctttgccagtcggcagggatcagtttgcctttatcatgaagaatctgtacgtcggtcacctgattgtaggtgacgacgtctgccttcagtccctgcaaaatcgccagcgcctgttttgatgacccggcatgagactgcttaatcgtcagcttatcgccgccgttatccttcgcccattgttgctcaaacggcgggttaagggcggcaaacagctcgcgggagacatcgtatgagctgttcagcagctccgttgcctgcgcctgccctgccagtaacagcattgctgccagcgtcaggggtctctttttcagtaagttaacggccattgcgcacccttataaatttaatgactttcttatggtcatcatatttataaccagcgctaaaggagtaacggttttatataccgtttgatgatttgaaagttgaaaagggaataagagaatccctccccacgcggcgtgaggaggagaccggcatcaatcagacgcctacgcttacgctttcaggcagggtactgccgccatcaatgacgttttgcgttccggtaagatagctggactcatcggaagccagaaatgccgccagttcccctacttccagcggatcggcaaggcggcgtagcggaatggcttttgccatttccgttaataccgattccggatcgtcagggttagactgacgggcaatgctttccgccatcggcgttcttacataaccggggcaaatggcattcacacgaataccggactgcgcatactctaccgccagcgatttggttaaaccgacaatggcggcttttgacagcgcataggccgtttcacccgggtccgccaccatatctcccgtgacggaagacatcatcacaatgcggccatctttacgtttaatcatctccggcaggacggctttggtgacgttccagacacctttaatattaatatcaatgtggaaatcgcgatcttcttcactcatatcgaggaagttgcccagacggcacacgccagcgttattcaccaaaatatcaattctaccttcagtctctttggcgcgcgcaaccgccgcctgcaccgaagcaaaatctctgacgtcagccttaacggcagtgcagcgatgcccgcgcccgcccagctcatccgccagtttttcaatctcatcggagatatccagcaagattaagttcgcgccgtggcgtgcgaatacgcgagcgatcccttcgccaatgccctgcgatgcgcccgtaatcaatgctgtcttgcccgtgagtttacccattttcaatgtctccttttgaatatggagtcttacactccattaacactgaaaatacagtaataacaaataagtgctgaggaatagctcactaattcaggtaaatattaggtaaaaaaatccccgcggaggcggggatgggcatttttatgctgttctgcctgatggcgctgcgcttatcaggcctaccaatcgtaggtcgaataaagcgtttgcgctgccatccgacagggttttaccttatagcgctaacaggcgatccagcgacggcgcaaaatagtagccgccagtcaccggtttggtgaagcgcagcatcgcgtcgcgtttaccgtcggtatcgccgaacatactcagaagctgctgttcgatattgtgcagacgtgcgcagtaagcgcagaaatagagaccatgagtaccgctggcggtgccgtatggcaggctctggcgcacaatcttcagccctttgccatcttctttgagatcgacgcggctcaggtgagatgttgccggacgcgcatcgccgtcaatctcttcattggcttctttggtacgcccgatcatcatctcctgatcgtgaatactcatccggttaagttgcttgagattgtgttcccaacgctgcacgaacacataactgccgccggcatccacgccatctttgatcaccgccacttcacggcgcgtctcttcgcccgccgggttctctgtcccgtcgacaaagccgctcagatcgcgttcttccacccaacggaaaccgtgaacttcttctttcacgtcgatacagtcgccgaaggcttccatcgccgcctgggcaacagaaaaattcacatcgtggcgcagggaaaggatatggatcagcacgtcatactgcgtggccggtgccagccctttaccataaggaataaaatctttcagttcttccgccccgacgccgccactcagggcacgccaggtattgttgccaaacgccacaacggccccaagatgggcgtccggaaatttgacttcgaaggtcgccagtttatcggcaaatgttctgctggccgcgcgcagggcgtccaggtcgcctttcacattggcttcaatccaaattgccgcacggcaatgttccggcaaaatgccactttgaacctgagacatgattcctcctgaaaatgagaatgccacgcagtcgtggcattaatggaggctattttaccttgtttttaagcgaagcggtttgttcaggcgcaaattaacgacgccagataattttgcgcacgtcccagttttttaagacgtcatcaggaggcattaagccttccggtccgctccactcgccggagaaaacatagctaatatgctgacttccctcggctttacattcgacgctggtatggctatcgctggaaaccggctcgcagtgaccaaacgctttgctgtaaaggtcgctaaacggcgtaccgattttgccccccgcggcggttgggatatcgctgtccagcacatcaatacggctcacggttccctgctcgccgttgatcaccatcgcgacactgtcgcccttcatcgcttcgaaaaagcgcaccacgttgccgttatcggttttcataccgctacgcaggcgataatcgccatctaatgcctctgcaatagccggctcttccagcggcgtggcggcggtcagcgctcccacgccttgctcagtgacttctgtcgaggaaccaaaccagttccatggatttgcggcagaccagttgaccgaggagagcgtcgagcagccggtcaccgccagcggcagtgcgagtaaagtcaaacgcagcgatttcatctcacttcctttcttttattaattaacgttggttggagtgcgggttcgccaaaaagtgccgttattctttctcaagggaaaaacaggcacgcaaacgttgattggttaacagccagatcagcgcgacgatgtccgccagcagcagcgccagcccgacgccgttgaccgggtcgccacccagccacatcaccggcagccagcacaacgacaccagttgagcaaggatcaggagtccgcgcagccagcgccacacaccaggaaccgcgtcacgccgcccgctgagtaaaaatgccactaccgccggaacgccgggcaacagccccagccaaaaattgtcatggtcgggataaaaaaagtttaacaaagtattaccctgtccacgggatgaaccggcaatgacaaagagtacccaggcgcgcgcctgaagtagcagtacgcaccagaacagaaacggcaggcgtaaacgtccgtgtacatcataatcggctggatgaaactcagtactcttcatcttcaatcaggcgtttacccaaacttagggcgtcagaatgctcataccccagacgttcatacatgcccagcacaacgtcgttatcatcgcgcaccataatttggattttcggacacccgcgagcgatgagttttttttccagccggttaagcaacgcattcgcaatgccgcgcccgcggaactccgggtgaacgcccaggtaatacgccgagccgcgatgcccgtcataaccgcccattaccgtaccgacgacttcgccgctaacttccgcaacgaggaacaagctgacatcgtgattcaccttgcgttcaatatccatttcaggatcgttccatggacgcagcaggtcgcaacgctcccagagggtgatcacctcttcgaaatcttcctggcgaaaaacgcgtatttccatggtattcgttgccttttcgggtggaaaaaccaagattatggcgcaaacatctgattcagccaatatctgacgcgatgtagcggaaaaaatggcataatggcgatgtgtcacgtattgaaatgaaaagtaaaacaattctcatcaccaaccgtcgtaacggattacgcgatacgatataacatcttgaacttaattttcacaactcaggccgtatgagcacttttaaactcctaaaaactctcacatcgcgccgccaggtactcaaaacaggtctggcggccctgacgctgtcaggtatgtcgcacgcagtagccaaagaagaaacgctaaaaaccagtaatggtcacagcaaacccaaaaccaaaaaaaccggcagtaaacggttggtgatgctcgaccccggacacggcggcatcgataccggcgcgattggccgcaacggttctcaggaaaaacacgtcgtactggcaattgccaaaaacgtgcgcgctattttgcgaaatcacggaatcgatgcgcgtttaacccggacaggggatacttttattccgctgtacgatcgggtggaaatcgcccataagcacggcgcggatctgtttatgtccattcatgccgatggttttaccaatccgaaagcagcgggcgcttccgtttttgcgctttccaaccgcggggccagtagcgccatggcgaagtatctctccgagcgtgaaaaccgcgcggacgaagtggcgggtaaaaaagccactgaccgggatcatctattacaacaagttttgtttgatctggtgcaaaccgatacgattaaaaacagtctgacgctgggttcgcatattctcaagaaaatcaaacctatacataaattacacagccgcactaccgaacaagcggctttcgtggtgctaaaatcaccgtcaattccgtcggtgctggtcgaaacctcgtttattaccaatccggaagaagaacgcctgctgggcacgacggcgtttcgccagaaaatcgctacggcgatcgccaacggcatcatcagttattttcactggtttgataatcagaaagcacacacgaagaaacggtaatcatgaaacccgatgcacatcacgtaaaacagtttctgctacgcctgcaggatgatatttgccaaacgttatccgctgtggatggcgcaaactttgtcgaagatagctggcgacgcgaagcgggcggcggcggacgcagccgggtattacgcaacggcgggattttcgaacaggcgggcgttaatttctctcacgttcacggcgatgcaatgcccgcgtccgccaccgcgcatcggccagaactcgccgggcgtagcttcgaagcgatgggcgtatcgctggtggtgcatccgcacaatccgtatattcccaccagccatgctaacgtgcgcttttttattgccgaaaaaccgggcgccgatccggtatggtggtttggcggcgggttcgatttaacgccctactacggctttgaagaggatgccgttcactggcaccgcaccgcccgcgacctgtgccagccgtttggtgacgatgtgtatccgcgttataaaaagtggtgcgacgactacttttttctcaaacaccgcaacgagcagcgcggcgttggcggcctgttttttgacgatttgaatacgccggatttcgaccactgcttcgactttatgcaggcggtcggcaacggttacacccgggcgtatttaccgattgtcgaacgacgcaaagcgatggtctggggcgagcgggagcgtaattttcaactttatcgccgcggtcgctacgtggagttcaatctggtgtgggacagaggcaccctgtttggtctgcaaaccggcgggcgcactgaatctatcctgatgtcgatgccgccgctggtgcgctgggagtacgactggcagccagaagcgggtagcccggaagcggcgctgagcgagtttattcaggtacgcgactggatttaacttatttataaagtaaaacaatgcaaacaaatacacggaaagtagtaaccagtgacgccaaatggcatccccatctgggtataagttttattggctgcctgcttgccattacactagaaatatattttgaagaaagaatattcatccctcatagcggaggggtgagcttcggtctgatcgtgcttctggttatcaatatggtgaccatccctgtggtcatggccctgatagcattactctgctttattattcatattccgcgtaaaagcgttaactgtatcttgctatgcctactgtcatgtattttgacgatagccggtttgtttatcgcctatccggttggccgttgaataaaagcaggctcgtagaaataaacgagttcattgtagataaagaattcggataaccgcccgctgccgttatcattagtaaaacagtacagtaagcactcgtagaatttgcagtggagcactaccgcatggacgagcgtattccttgtaaaaacccgcaatgctcacacttcatcctgccagcaacggctgcccgcacggagggctattgtatgccctgcgtccaggcgcgctatcggcaagtgcaggaagaatatatccggaaaaacagaaaaacgatcgacgcgttcagtggcattaccaaccctgttgaaatgcttaaactcgttcatgaaccccgggaacacgatccgttaatcgagtggattccctgccccattccgaccgatgagctttacaaaaagctctccgatgatgaaagccgcgacatggtcgattatgcagaagaattatttgattccggatggcaggaggaagctcaggaaattgcgctgtgcctggcggcatttacccaggccaatctggataatttcctgcgccaggtaataaatgaagaagaactggagctctcttcacccctaccttttcaccgtgcgccgcctgacgtacgcgacgcgcttttgcagaaggtggaaaccgatgacgaaaaccgtgacggcattctttgtgccctggcctggattggcgatgaggttgtcgttgagcattttaaccgctggcgccaggaaccacctgcgtggagtgcttcacttcatatcctccctcatcgctatgctcaccaggcgggatgggagctcactgaaaatggccgcaggcgcgatctttactttacgcaatgtacccatctggtaaaacaggcacctgaacagccggccgtttttcgcgccgttgcagaatatggtgaaaactgcccacactgttccctgccgctaatcaatctgtttgaggttgcgccgagcgccgtcggcctaagcacgcagggttggcccggtcaaattcgtattctgacctgtcagtgttgtacggcatataacaccgttttcgccaccgtcgatccacaaggccagccgcgatggtacgaaaaaaatgcgctctcgacgctggcggtggagaattccgctgactggataacgctaccgcttgatgttctgcaccccggggaatcccgtttgccgctattcgctgctgaaatatttttacccaccaccttctcacagctcggcggccatcccgcatgggttcaggatacagactatcctacgtgcccaacgtgcgcgcaaacgatgatgtttcttgcgcagctaagctatgaagatatcgaggaagaggaatatgcggaaggaatgctttacgggtttatctgcccctcctgccaaacaacggcaacgtcttatcagcaaacataaacgctcatcctcatgatctgatgacaaaactgttttgcacgttgtgcgcgcgcttccccggaggcggcgctggcgcgccttgtccgggctaccaaccacagacagcagcgaatccgtaggcccggtaaggcgccagctgccaccgggcaattcccgacacgcgcacgttatcagcaaccggagagcctccccatcaatatcaagcccattgccgcatccgttgatgcagcgtcaacgacggtttttcggcaaataattgctgataatcggtggcaaattgccccagatgccagaatccccactgcatcgcggcatctttgaccgtggcgctctgcgaccacgggctaatcagttcccggcgtactgcgtttaagcgaatacgtttcagccacgcattggggccaatgcccaaaatggcgtgaaacgcattttgcagcgtgcgacggcttacgtgtagctggttacataagtcgagcaccgtcagcggctccgacatattttccagcacatattcccgcgcccgcgacagtagcctacgatatccctgatggctgatgctttcggcgctatgaatcggcttcgcctcttccagcatcgtgcccatcgccagcaataaattatcactcaagaccttacgcaccgcaggttgatgcagagtttcaggactctcgctgaaggtggccagcgcctgctgcacaaagccccacagcgctgctttatgctgctcttttacctccagcgctagctggttacgcagcatatgcagcaccctttccgggttatgcaaaaacgtggcctgacgggaaataacatcttccgagataacgacgcccagaatggtgtaatcatccggcgtgctcagttcaaactcggtgcctcccggtcgggtggcaatctcggcgctgccgagcccctgcgcgccgataaatccctgttcgccgcgcgtcgccggaataccaaaccagaaagagtttggccaaaccagacacgactgacgcagcgccaggccggtgtattcacggaacacctgaatctcatcaagcaggatttccgtgaactcgccatgaaatttacccgggtgtaactgatcgtagatctgctgccaggcggtgatagtcagagcatgttcatagacatccgtcgtccgtcgctgatgaacattgtccacctcgactctgggcgtaagtttaacgtcttcgggtaacgcttcatgataaagatggtgcaaattcgctgtacgggtctttttcatgatcttctatgccggacgcccgccaggacgcccggccctccgacagattaatttttgatgcgatagcgactactgcgtttacgcaacgctccgtcagaaaagagttgttccagcacgtttctggcctgctccagcggccagccaaaatgcgcggcaacctctcccgccgtcattccctggcgtactgatgccagcagcgccaataacgcctcagcgaactcaggcgttgcgggtacctggggtgctttctcagtcggcgttgtcgcacgcgcaaacccgccaatcagccactgggtgtcctcttccggacgaccaatttctttgcgactaatcacacggcctgtgcgctgcgcggcagcgcttccggcatccagcgccgcacgacacgccgccagatcgccctccaccaccagcgtgagcctgccagggtcgagcacttgatgactgagcaaacgcacgttggccgctttcagcatggcatccgccgcatcgacggcggcgaccattccgtccacttccagtaatcccagggcattgatcattggcagcctccgttacgcacgctggacagggttacgggcgatatccagcacggcgtcggtaaaggcgttgcaggcggctttacacgcggcctggcttcccgttaagaacgcggccgaatagttggtttccgacggcggcggcacgtaagtcaccagctgaacgtcagcggatttcatcgccgcgtcaatgccgaatgtcgcttccagcggcggcgccaccaggtaggccattggatcgcccagcgcgatacctgcggtagacgagaggtacgagccggtacgcgaaaccacatgcgccaggaatgcggtattttccgcatcgttcgcccactggaacgccgcgccgttttcaatgctggcgaccattgcatccagaccggcgcgcacttccgccgggttcggtccgcccagcataatcaacacctcaccagcggtaggcgacggcccgtgagccgccccggcatagagggagcggccatagaccacttccaccatcgcctgttttgtcgcttcgtcagcggcaatataggtcacatcatcagaatctgccgtgatgagtccgagactacgtatatgtggcggtaatttaagttcccgcgcaaagccgtcattcacggaggcaatcacgcgcatggcagtcactgaaggtcgaattaaatctaatgcaggcatgatgtctccttaacgggtcatgttgatgccggacgctttctgctccagcatccgtttggccaaatccacaatcacggcggcggcttctactggcggcgtccccccctgatgaatgtttgaaatacaggttctgtcggcctcgacggtggtcgccacgcgcggggaatagaccgcgtagcaggaaaggctttccgactgccccagccccggacgttcgcctaccagcaggatgacgaccttcgcgccgagaatttcgccaatctgatcttcaatcttcacacggccatagcgcacaaagaacggcgtgccgacgttcagcccggcctgcttcagaccggcaagcaacggcggcaggatctcttcatagttggcggtgatcgcatccgtagagaggccatcggagaccactacctgcacatccgggttcatcacgcactgtgacttcagcgcgtcaatggcttccgggctcaggcgacgccccatatccgggcgcgtcaggtacaggtttttgtcgctgatctccgaacgcacttccagcagcccttgcgcttttacccactcttccggcacttctttgagcacggtatctttcgaacgggagtgatccgccaggaagcgcaacagcgcctgggtgcgcggacgcggcccggcacgccccgtacagacgcgtgccgcagtactgcgacgcagttcggtcagcacgtccgcacgatgtgggttctcgacgccaatccaggcttttgcctccgcggaacctaaatccagcgcgcagctttcggtcaccgtcggcgcggcgcactgcggctttgcgccttcctgcgttgacggcgcggcgggctgcggtacgtcctgtcccattgacgccatcacgctacgtacaatttcttcaatctgtttttgatccatggtgttatccccgcgtcatcagaagaacagtgacggatcgcccgcccgtttggtcagacgaccgtttgccataatgcccatcgtttccagccagcgttcaaactccggcgacggccgtaaattcagcaactgacggacggtggcggtatcgtggaaagcggtggtctggtagttgagcatgatgtcgtcgccgagcggcatccccatgatgtagttacagccggcagtggcgagcagaatcatcaggttttcgttaaggttctggtcggcgtcggcatggttggtatagcagcagtcgcagcccatcgagatgccgctcagcttgcccataaagtgatcttcgagaccggcgcggataatctgcctgtcgttgtagagatactccggcccgataaagcccaccacggtgttcaccaggaacggatcgtagtggcgcgccagcccgtagttacgcgcttccatcgtcacctggtcggcaccaaagttcgcgcctgcggagagcgcagacccttgcccggtttcaaagtacaggcagttttccccggcgatgcggttgaactccgcccccacagcccgcgcttcgtcgagcatggccagctcgacgccgaactcttttaagcccttctcgctgccgcaaatgctctggaaaatcagtccgcccggcgcgccgcgacgaatcgcttcgatctgggtggtgacgtgcgccagcacgcagccctgggtcggaatattgaatttatcgataacgccgtaaacggtgtcgagcacgcgggtcaggttctccacgtcatcggtcaccgggttaacgccgatcaccgcatcgcctgcgccgaaagaaagcccttcgtagatttgcgcggcgatactctgtacatcgtcacgggtatcgttcggctgcaaacggcagctaaaggtgcccggaataccgatggtggtattggcttttttgatcaccggcattttcttgccgccgtagatcaggtcagcgttggagcagattttcgctactgccgccaccacttcggaggtcaggcctttgcgggtaaacgcgatgtcgtccacggaggtttcatcgctcagcacgtattcacgcagttcgctgatgctccagtttttaatccggttataggccgtttcgttgacgtcgtcctgaatcaggcgcgtcacgcagtcctcttcataggcaatcaccggattgttgcggatatccgccaccgtcatttccgacagtacctgttttgccgctacgcgctcctgcgaacttgccgcggcaaccccggccagcacatcccccgaacgcagttcgttggctttagccagtacctcttttacatccttaaactgataaacattgccgaacaatgtggtctttagtttcataagtcgttccctcaggaaggaaatgcgagtgatttcaccgtcaccggcacaaccgatccgccaaaaagaggcgtaccaatgtcgatatagtctcccgcccgcacgaccacctcatcgatgaccgccagcggaagttgcggtaactgtgggcgcaataacatgcccagcgctttaccaaaatcctgctcggccaccaccagcaggggatgtggattgggataacgcgcgacaaaagccgtcagcgcgttgatgaccgtgagtaatgcggcgtaacgcaccggaagcgtggcgggaagcgccagcacgtaagcgtcggtttgcgggtcgagatcaagctggagaagcgcctgccgccaggcgttcaccagatcggcgtcatcctgcgggatcgccaccggcaggttgcgcagcggcagttggacgtcttccagccagatagtactgccggaaagcgagagcgtatgggcccccgcgccaatcaccgtggcgcgcacggtttgcgccggaaactgcacgttcatctcgcgcagacgcgggtgctcatgcagcgcggtcgccagcagcggcccgatatcagaaaagcagaacggatcggcaggttggttgcggtagcattcacctaccccaccggaaagggtgatcacctccggcgtaatatcggcgggcagcagcccggtttgcatcagcgattgcgccagcggcgagagcgcgccagtgataacctcgacgatgagatccgccatccgccgcgccacctgtcccaactgtgcggcagctaaggcgcgagcatcagtacccgaaccgaacacctcatcgataatcatctgccccggctgatgggcataaaccacgcgcccctgagcatcggtttccagcaggcgaccaccgacgttaaggcaggcggtgccgctgacttttcccgcgtcaaacagcgcgtagttagacgtgccgccgccgatatcaatattcagcacccggcacatccgctgctcagacaagctttgcgctccggcgccgtgaccggcaatgaccgattccagatgcggcccggcgctggcgaccacaaagtcgcccagcgactgcgagagcgccatgaccgccggacgggcgttgcgggttttggcgctttcgccggtgataatgatagcccctgagtccaccgattcaggcgcgatgcctgcggcctgatactgggccagaatcagcgctttaagttctacctctttcagaccgccctgcttatccacgggcgtaaagaagaccgggctttgccagctaatgtcgcgtttgatgaattcgtagcgcggcacctgcgacaccgccgcacggttaaccaactccaggcgcgagaagatcacctgcgtggtggtggtgccgatatcgataccgacgctcagtagctggcgagtgttcacgattgcgcctccgcttcggttttcacctgggcggcgtcatctttcggcaccagcatcatcgccacgccaatcgccgtcacgccgccgatcagcttgccgacaatcatcgggaagatcatggcgttcatgttggcagcggcgaagcctaaatggtcgcccagcgcgaacgccgcagagacggcaaatgcgcagttaatcactttgccgcgggtatccatctgcttcatcatgccgaacatggggatattgttcgccagggtcgccaccatgcctgccgccgcaatattattgacgttcagcagtttaccgacattcatcaacggtttttcaaaccagcgggtcagtaacagcaccatcggatacgcgccaagcagcacgcaggagatagagccgatcacttcaatggcgcgcatcacttcgccgggtttgtcgcctggcgccataaagatcgggtcgagtcccggaatcaactcccaacccaacaggaatttaaccaccgcagctgccagaccgatggtgatcagcgctaccagaaatttggcgaagatctggaaaccgttgatcattttttccgggatgaacttcagccccagcgctaccagcaccgcgacgatcaataccgggatcatgttcatcaggatcagcgcgaaggtaaactccactggctgaccattgatctgcacacctgagtacatggcgatcagtccccccgcaatgcagccaatgggaatggtgacgatacccgccagtacgccaagcgccaggtagcggcggtcagacggttcgataatgccgagcgccaccggaatggagaacacaatggtcggccccatcatcgacccaagtattaaccctgagtatagccacgccgcgacatcaccgccggccagctctttggcgaggaagaatccgcccatatcacaggccagcagcgtacccgcgaacatggatgggttcgcgcccagcatttcgtataccgggataataaccggccccagtacatgcgccagcaccggcgccagcgcggtcataccgaccatcgccagccccagcgcgcccatcgccataaagccctcttcaaactggccgccagacccctcgatactcttgccgaatttaccgaggaagcgcgccgacccgccgaactgcgacaggattctgtccacggcggcaatcagcataaagaacatcatgatgtacatgatgatttcgttaattcccatagcccctactccctgtcatttttgatttgtaaaccggataagacgtttacgtcgcctccggcattaacgccgtgttattgccggatggcggtgcgagcaccttatccggcctacaggcattacccggcagccgcgtacaggtcgataatctgtgcctgtgtggcggtgcgtgggttactgcgcagacaaatatcctccagcgcggcttgcgcccacgcgctgtagtgttcgggtttggcgccagcgtcagccagccgtttgctctgtcccacttcggcaatcagctcgcacaccgccgcaatcgcatcgcgatcgtccgatttcttattggttaacgcccgacctatttgactgaagcgctcgcggcaaaccatccggttaaagcccatgactgttggcagcagcatggcgttggcctggccgtgcggaatatgcagcgccgccccaggctggtgcgccatcgcatgacacagccccagaccggcgctggaaaaggccattcccgccatacaggaggccagcaacatattttcacgcgccgccagatcgtggccgtaacccacggctttcggcagcgatttgccaatcatcgctatcgcgccaatcgccaggctgtcggtaaacggcgtggcgttgagcgcgctgtaggcctcaatcgcatgcgtcaacgcatcgataccggtcatcgccgtcacgtttggcggaacgccttcggtcacggcagcatcaagaatcgccacgtccggcattagtgacgcgtgcgccagcacctgcttgcgcccgctgaccgcgtcgataatcaccgttacgttggtggtttcagaaccggttccggcggtggtcggcaccgcaatcagcggcagacgcgggcgtaatgtactgtgctcggtcatggcgctcagcgtctggtcagggttagtcaccagcagggcgaccgctttcgccgcgtccagcaccgaaccgccgccaaaggccactacgccgtcgcacgccgcctcacgcagttgcgccaccgccgcgcagacatcggtgatgcacggctcgccaggcggacacggccagaccgtcatcgccacgcccttcatcgccaggctgcgtgccagcggcgcggtcattcccgcctgatgcaggaagctgtcgaccatcacaaacagatggcttacgcctcgcgcttgcgcttcctgtccacaggcgccgagcgccccaagtccgcacagcgtgaccggcggtacgctgaacgttttcacccgttgcagattcagggtgtcgaatgcctgaaacagcgccgtctgtagttcagcttgcatagagtccctccgctttcgctctcccgctgttggctatcgccagcggggtcataaacaggctgtgctgcggcaaatgcacctgtaactccgggaaacgctggcgaaataacgcctccacgcccggctgcatacaggagccgcccgccagccataaatcagcaattccttgcccttcaatgtggcgagcaacgatttccgccatcttttcgtacaccggcttcactaccggccaaatctcctgcgcattgctgcgcttgtactgttccgcctcttccaggggaatacggcggttgcccgccagcgtcagggagatatggtgcccgccagtggcttcatcggcggagtaagtcaccttgccctgtttgacgatggcaatgccggtagtgccgccgccaatatccaccacgcctgcattatcaagcgccagcagatccgctaccgccgtcggttcatccagtacatggctgacttctaacccggcagactccagcacgttgatcgaaatacgcgggtcggtgcctggcggaaacgaggtcgccgcgtgggtaaagcggcagccgagctgctgttcaagggtgtcgagatggcggcgcacgagggtgacggcgccgaagaaatcccagacgatgccgtcacgcacaacgtcggcccagtcaaggcataccgccaccggctgggcgttgccgtcgaccaccatcgacaccacgtcgcaggtgcccaaatcgacgcccagccacagcggtgtatcgctggcggcgggcgtctggttacacagggccgccgctttttgcagtcttggggtgagccagagttgttcgtcgtgcgccatgagtcatcccttatacaatgcgaaacgcatccaccagcacgcatcgacgcagccgcacaaaggtacgcgcgctggtcaccccttcgccggttggcgtagtgatagtcatggtggtccagccttctccgcccaatccaagcccggcaatgcacggcccgtttttgacgaaaatgctggtgtcgatggcgttcgccatctggttcatgttgtcgatattgcgcgagtgcatcgccgccgtatggtggcaaccgccttcaagctgaaccgccagggcgatggcttcttcgacgttggcgacccgcaccaccggcagtaccggcatcatcatttcagtaacggcaaacggatggttggcgggcgtttccacaaacagcaggcgcgtttgatccgggacgttcaggccgatggctgcggcgatcttgcccgcgtcacgaccgacccagtcacggctgacggtgcctttgccgcgttcatcgatattcttcagcagcaccggctggagctgttcggcctgagcggcggtcagtttcaccgcgtgctgaccttccatcagacgcatcagctcgtcggcgacgctatccaccacaatcagcactttttcgtcggcacagatgatgttgttatcaaacgacgcgcctttgacgatggattgtgcagcgcgcggcaggtcggcggtctcatccaccaccaccgggggattgccggcaccggcggcgatcaggcgtttattagtatgtttacgcgccgcgtccaccaccgcttcgccgccagtcaccaccagcaggccaataccgggatatttgaacaaccgctgggcggtttcgatatccgggttcgccacggtgaccagcaaattttccggaccaccggcggcgaccaccgcctgattgaggagagtgattgcccgctgagagacctttttcgccgccggatgcggggcaaacacgacgctgttgcctgcggcaatcaggctgatggcgttattaatcaccgtcgccgccggattggtggacggcgtgaccgaggccaccacgccccacggtgcattttcaatcagcgtcaggccgttatcgccggtcagcacctgcggagataaacactcgacgcccggcgtgccgcgcgcctgcgccacgtttttggcaaatttatcgtcaacgcgtcccatgccggtttcgctgacggcaagttccgctaattctcgggcgtgtttttcgcccgcttcgcgaatggcatgaatggcaagctggcgcatcgccacgctcttcagcccctgctgggcccgttttgctgccgccactgcgtcatccagggaggcaaaaacgcccatctcatgaacagtactggccggctggctgctgtctttcattttcagcagtaccgctttcaccacctgttcaatatcctgttgattcatgatgttcaatcctatttatggaaaaccactttcccgccagccaccacttcatcgacgatgccaatgacgcacagatcgaccggtgataattcgctgcgatgcgcctggcgtgcggaactgccgctgaccagcagtacccactctccggttcccgccccgatactgtcgatagcgacggcacactgcccgtcggggttgccctgggcatcgatcatttccaccatcagcaatttgtcatgcgccagtccctgatggcggacggtacatacgatttgtcctgtgacgactgccagtttcatatccgcctccatggattgcccgttgggtcgtaggccttgaatctgcgcaccatcaggcaatggcgcgcattcatgccggatggcgacgctgcgcgtcttatccggcctaccatcaaatgttgctgtcgcctttgaagctgatcgggaacacttcttccagatcgccgtgcgggcgtggaatcacgtgtacggagaccaactcgccaatgcgctgcgccgcagcggcgccagcatcggttgcggctttgcacgccgccacatcgccacgcaccatggcagtacacaggccaccgccaatctgcttcacgccgaccagcttcacgcgcgcggcttttaccatcgcatcggaggcctcaatcagcgcaaccaggccccgggtttcaatcattcctaatgcttccatcgtgttttcctctcattaaaggggtccagaacgggaccgttcattcaaccagtgtgtgtaagctgcgttcgcggctcacgtcagcctggcgcggcacggctgccaccaacgccagttcgataatttcctgcacgctacagcctcgggagaggtcgtgaagcggcgcggcaagcccctgaattagcggcccaacagcgcgatagcctcccagacgctgagtgattttgtagccaatattgcccgcctccagcgacgggaaaatcatcacgttggcgcggccttgcagcgggctgtcaggcgctttttgcgcggcgacctccggcacgaaagcggcgtcaaactgcaattcaccgtccacaagcagttgcggcgcacgttcgcgaacgagctctgtcgcctgctgcacgttggcaacattggggtgacgggcgctgccgttgcttgaaaatgacagcatcgccacgcgcggctcttcgccggtaatggcccgccaggtgtcggcgctggcgagagcgatatccgccagctgcgccgccgtcggctgcggcactacgctgcaatcggcgaaccctaatgccggaccggcatactgcggcagcatcaggaaaatagacgacaatgttttgcacccgggttgcaggccaatcacccgcagccctgcgcgcagcacgttcgccgttgacgacaggttgcctgcgatacacacatcagcctcaccggcgctcaccatggcggcagcgaacatcagcggatcgctaagcttttccactgcgtccggcggcgttttttctccggcacgggcaagccagcgttgcgcaaaacgctggcgcatactcaggttgctgtgtgggtcgatgacctgaatgccatccatcgccatacgatgactcagggcaaactgacgcagcgcaaacggactggcgaccagaacggggcgagccagaccgtactgttgcaggtaatgcgccgctttcagcacgcgttcgtccagcgcatcaggaaagacgactctggcgggggcgcgtaccgccagttcgcgggcgcgttcaatgatcatggcttctctcccaaccgttgttgaatttgggcgaccgtcagcggatgtttcgccacgctcaaaatcatcatcacgtaaaccgtactggagagacggttcagcgcctgtaaaatgtccgggcgcaagacctcaaaactacgggtaataaacacttgtgcggcgagggtttctgtttcgcggactttggttcgcagcagattaagcagcgccgcatcgcgaccgtggctggcctccggcaccaggtgatcgtggtcgaggtagcgcagcggctggtgggaaaggcgatgcagctcatcctcgttcagtccgacgatagactgcgccgccagcggttcatctatagcgtcggcgcgcataatgttgcccagccgcgagcggatatcgaaaagccacggctgccagggttccgccagttcgatttgtagccacacggtcagcgcgatggcgctgtcgagcgcggcgcgaaagccgaggcgcgggtcgcttttggcgaccattttgtccgccgtcagatgggtcagcgtatcgggctttttcaccaccggctggcggcacagttcacagcaggcctgtgggtgcgtatcgctactggttaagccatgtaccggctgcggctgctgttcgtcatcatcgacaaacagccggccttgcggatccagaaacttaatgcgcagacggcgactttccagcagttcccgggccgagggcgtcagtcgtgcgtcagcgggcagatggatctccgatccttcgctgagcgtatgattcgctctgagccacgtttcggtgatgaaatcgttcatacggattgccagtttgcaggccaggcgacgtacagaaagcgcacggacgttggcgtgccaaattcaatgctggagcctttagggatgaacatcacatctccggctttggcaatcatggtttcgccttcatggcgtacgtgcagttcgccttccagcaccatgtcgatttcgtcgtagttcagcgtccacgggaaaaaggcgttgtcccactgcataaacccggcggccatgctgctaccatcctgctctgtaaccagatcggttaagccgacgcagtgcggttcggcgccgtcgaagcggccaaatttcacgctgctgccgtcaatgactttcacgccgcctttacccgtgacggaggtaaagctcggctgcatcgtccccagttccagcgactgcttttccttcagcactttttccatcaactgcgccaccaggctttcagtaaactgcccttccgggagctgcgcgatgatggcttcccgaatgcgctggctttcgcttttacacgcctgcgccgatgtggatgccggaacggactcgtcgcattcggtaatcgtgaagcccagtagttccgccacttcgcgagcctccggggtaataatgctggcgcgcagcactaccgacatcgcctgttcgccgcgggcgtgggccgcacgaatatcgttagctgtgataagttttttcacctgcctcttcctcctgttcactgagagccgccagataatccaccaactgccgcacgctttgcgggtcgtggccgttgagctcgaaaatcggctcccggaatccaatctcgcaaagcaactgccgcgtagcggcgacgtcggcatccggcatgtccgttttgctgataacggcgatatgtcgtttacgggttccaacatccaataacccggcaggtaagcgactttctttatcgtttgccgcgtggacataaatcagcgtgtccacatcctgcaacgtggtaattaaggcgtgataccaacggggatggctaaaatattcacccggcgtatcgatatcgccatgatcattaaattccacggcctgcgtttttctggcgagggaataatttccccgtaacgcgttaaaaagcgttgtttttccggcaccgaccgcgccgacaaaagcaatacgtttcattaccgccaccaattaactttttgttaactcacacagggtaaagtttaataatcgccccagcccgctgaccgtctgtaatagcgcttcttctactgcgccgacggtgccataaatcaccagcgcgccgctaaatctatcgagaaaaccgatgtgtacatccgcagccttcatcgctaaatcgccagcgatcatcgccgtttcccccggcgttaaagtcataatgccaatcgcgccagcatcgggaacgccgatctttttcgccagttcttcaccagggtgcgcaatgagatgcgccagcgtgacctgtttgcccggcacaaattcctgaataatgcgttctttattcattgctcaccgtctccactgaaactgccgtcatcgtggcaattttttgtcggagtaaataacaaaattcggcaaggtgatgtaaaaggtgaggtagatcactaagagaaagaaaataaaagtgacttctgtcgaaggtgttaacgataaatatcgtggtgcatcacattttcaggcgtcattctgaatttaagcctgttccgcaataaatactcaccgactattctttgtattactaccattgataaaaataatgcgtatcactcgatttgtgcatagtacagattcagtgaaataagtaggggtaagcgcaacaggttccagaatatccccacccgagcctttcatgccatggcgaagcccagcggcgcataaataaatatcctccggcatagccggaggtttttcagatgcgcctataaggctctcttaccagccgcgccctaacaggcgcatacgatctgacatttgcatcaaacttcgttacttacggcccgtaaacgggctgcccggatacgggatcgataattgctcacccattttatcctcttcaagctggtgctttatgtagtcctgtatcttcgccgtgttcttacccaccgtatcgacatagtaccctctgcaccagaactccctgttcctgtatttgaattttagatccccaaactgctcgtaaagcatcagactacttttacccttcagatatcccatgaaactcgacacactcatcttcggcgggatctccagaagcatgtgaatatgatctgcacaacattctgcttccagaattcgtacgtttttccattcacacaattttcttaatatgctgcctactgccctacgcttctctccatagaacgcttgtcttcggtatttgggcgcgaaaactatgtgatatttacagttccatcgggtgtgcgctaagctcttttcgtcccccattgggacccccttttgatttcttgttgaacttttgcagttgccagaccgcaagatgttttaacaaatcaaaaggggttttaataactggcttaaagctgaaagctttccggaacccccagcctagctgggggttttccatagacaaaaaagcgcaggagaacctgcgccagaagagagagtaatgcgttattaaagcggcgtggtttgcgcttcaactaccgctaacgccaccatattcacgatacggcgtacagaggcgatcggcgttaatacatgtaccggtttagacacgcccatcaggaccgggccgaccgtgacgccttcggaactggagacgcggagtaagttgtaactaatgcgagcggcttccatattcggcatcaccagaatattggcggctcccttcagcgggctatccggcatccggtcattacgaatactttccaccaacgccgcatcaccgtgcatctcaccgtcaatcatcagatcgggcgctcgttcgcgtacccgctcaagggtttcgcgcattttgctggcggacagcgaatttgaggaaccaaagttagagtgcgacaacagcgcgactttcggctcaataccaaagcggcgaacggtttccgccgccattacggcgatctccgccaactgttccggcgtgggatcttcgttaacataagtatcggcgataaaagtgttgccgcttggcagcagtaaggcgttcatcgcccctgccgtatgcacgccgtcacggtagccaaagacggctttcacgacgctgaaatgctcatggtagtcgccgatggtgccgcagatcatcgcatccgcttccccacgctgcaccatgatcgcgccaatggccgtatggttgccgatcatcgcacgctgcgcctgttcctgagttatcccgcgacgcttcatgatctggtaatactcgctccagtactctttgaagcgcggatcggattcattattcacgatctcgaaatcaacgcccgctttgatctgtagccccagtttctggatacgcatttcgatcacgctcggacgtccgatcaggatgggcttcgccagtcccagggttatcaactcctgggttgcgtgcagcacgcgcgcctcttccccttccggcagcactacgcgcttcggatctttgcgtgcctgcgagaagatcggcttcatgaacaggttggttttgtagacaaactcggtcagtttatcgatataggcatcaaagtcagcaatcgggcgcgtcgccacgccggaatccattgccgctttcgcgaccgccggagcgattttgacaattagacgcgggtcaaacggtttcggaataatgtattccggcccaaagctcaggtcctgatcgccataggccgaggccaccacttcgctctgttcggcgtgcgccagctcggcaatcgcacggaccgccgccagtttcatctcttcgttgatcgccgtcgcgccgacgtccagtgcgccgcggaagataaacgggaagcacaatacgttgttcacctggttcggatagtcggaacgaccggtacagatgatggcgtccggacgcacttctttcgccagcggcggcagaatttccggttccgggttggccagcgccagaatcattggcgcgcgggccattttcttcaccatctcctgagtcagcactttcgggcctgaacagccgaggaaaatatccgcgccgtcaatgacctcatccagcgtgcgcttgccgctgtcgtctaccgcataggccgctttggtctccgccatattcggctcacggcctttgtaaataacgcccttagagtcgcacaccacgatgttgtgcttttgcatccccaacgcgaccagcaggttcatacaagcgattgccgccgcccctgcgccggagacgaccatccgtacgtcggaaatatttttctctacgactcgcagaccattaagaatggcggccgtactgatgatcgccgttccgtgctgatcgtcatggaaaaccgggatgttcatgcgctcgcgcagtttctgttcaatatagaaacattccggcgctttaatgtcttcgaggttaatgccgccaaaggtcggctccagcgctgcgaccacattgataaatttgtccggatcaagctcatcgacttcaatgtcaaacacatcgatgccggcgaattttttaaacagaacgcctttgccttccatgaccggcttgccggccagcgcgccaatgttgcctaaccccagtaccgctgtaccgttggaaatgaccgcgacaaggttgccgcgcgcggtgtatttgtaggctgccagcggatctttttcgatttccaggcagggcgccgccacgcctggcgagtaagccaacgccagatcgcgttgggtggcaaggggcttagtcggagaaacctgaattttaccgggtaccggaaattcgtggaaatcaagggcgctttgttttaactgctcatccatcttgttgttcctttcacgtatcgttcaaaaagtgacgcggcctggtgcgccgcacattatcaccgtactgcgcaacacaaactttgaaggtctgcaaactatcacgacgcagcgcaagagtttgttatcaacttataacggtcatgttacctgcttataccagcaataccatgcctgtctgctatgctttttggttatgtagtgtatcaatctttcagaagtgtgaatcaacacactcatctaacactttacttttcaaggagtatttcctatgaaccagctagacggcatcaaacaattcactaccgtcgtcgccgatagcggcgacatcgagtccatccgccactaccagccgcaggatgccacgacaaatccctctttactgttaaaagccgccgggcttgagcagtatggtcatttgattgaggatgcgattgcctgggggaaaaaacacggcggtacgcaggaacagcaggttgcggcagccagcgataaactggcggttaattttggcgcggaaatactgaaaagtattcccggtcgcgtctccactgaagtcgacgcgcggttatcgttcgataaagaaaaaagtatcgagaaagcgcgccatctggtggatctctaccagcagcagggtgttgataaatcacgcattctgatcaagctcgccgcgacctgggaaggtatccgcgccgccgggcagctcgaaaaagagggtattaattgcaacctgacgttgttgttctcttttgcccaggcgcgcgcctgcgccgaagcgggcgtctatttgatctctccgttcgtgggccgaatttacgactggtatcaggcgcgtagtccgctggagccgtatgtcgtggaggaagatcccggcgtgaaatcggtacgcaatatctacgattactttaaacagcatcgctatgaaaccatcgtgatgggggcaagtttccgccgtactgagcaaatcctcgcgctaaccggctgcgatcgactgactatctcccctaacctgcttaaagagctgaaagaaaaagaagaaccggtgatccgtaaactggtgccttcctcgcagatgttccaccgtcctacgccaatgacggaagcggagttccgctgggaacataatcaggacgcgatggccgtagagaagctgtcggaaggtatccgtctttttgccgttgaccagcgcaaactggaagacctgcttgccgccaaactataaaccttgcatggagtgatttatgtcccgtaaagaccttgccaatgcgattcgtgcgctgagcatggatgccgttcaaaaagccaattccgggcaccccggcgcgccgatggggatggcggatatcgctgaagtgctatggaacgattttcttaaacataaccccaccgatccgacctggtatgaccgtgatcgttttatcctttccaacggtcacgcctccatgctgctctatagtctgctgcatttaaccgggtatgacctgccgctggaggagttaaaaaacttccgtcaactgcactctaaaacgccaggtcacccggagattggctatacgcccggcgttgaaaccaccaccggaccgctgggccaggggctggcgaatgccgtcgggctggcgattgccgagcgtacgttaggcgcacagttcaaccggccggaccatgagattgtcgaccactacacctatgtctttatgggcgacggctgtctgatggaggggatctcgcatgaggtgtgttcgctggctggtacgctgggactgggcaaactgatcggcttttacgatcacaacggcatctccattgatggcgaaaccgaaggctggtttaccgacgataccgccaaacgttttgaagcctaccactggcatgtcgtacatgacattgacgggcacgatccggaggcggtgaaaaaagccattctcgaagcccagagcgtaaaagataaaccttcgctaattatctgtcggacggtgataggttttggctcgccgaataaagccgggaaggaggagtcgcacggcgcggcgctgggcgaagaagaggtggcgctgacccgccagaagctgggatggcatcatccggcgtttgagatcccaaaagaaatttaccgcgcgtgggatggccgtgaaaaaggcgagaaagcgcagcagcagtggcaggaaaagtttgctgcttatgagaaggcttatcctgagctggccgcggagtttacccgccggatgagcggcggactgccggaggcatgggaatccgccacgcaaaaatttattaacgacttgcaggctaatccggccaaaatcgccacccgtaaagcatcgcaaaatacgctcaatgcctacggtcccctgttgccggaactgttgggcggatcggcggatctggcgccgagcaacctgactatctggaaaggttcgacctcgttgaaagaggatccggcaggtaattatatccactatggtgtgcgcgaattcggcatgaccgccattgctaacggcatcgcccaccacggcggctttgtaccgtataccgccacgtttctgatgtttgtcgaatatgcgcgtaacgcggcgcgtatggcggccttaatgaaagcccggcagattatggtctatacccacgactccatcggtttgggcgaagatggcccgacgcaccaggccgtggaacaactggcgagcctgcgcttaacgcctaacttcagcacctggcgtccctgcgatcaggttgaggcggcagccggctggaagctggccattgaacgtcagcacgggccgacggcgctgattctctcgcggcagaatctggcgcaggtggaacgcacgccggaacaggtgaaagcgattgcccgcggcggttatattctgaaagatagcggcggcaagccggatatcattctgatcgctaccggatcggaaatggaaattaccctacaggcggcggaaaaattgactggcgaggggcataacgttcgcgtggtgtcgttgccttcaacggatattttcgatgcgcaggacgaggcatatcgcgaatcagtgctaccggcacacgtaaccgcccgcgtcgcggtggaggccggtatagccgactactggtataaatatgttggcctaaaaggcgcaattatcggcatgacgggatacggtgaatccgctccggctgacaaactgttcccgtattttggctttaccgtggaaaatattgtagaaaaagcccgccgggtgctaaacatcaaaggctaaggcgagcgttagcaacacagactttgcacagtctgcagacctgttctgtaggctgtgcaaaattacttcgtagactcaggcgcatctgactgcccgatgacgacctcatcaatggatttatggcacatcaggcaaaaggccttttttttatgcgcctgcaatgttgaatcccacgccgctgatccgccttctttattcactttttctcttatcgccgccagccgatctatttcataataagcgctcaggcagccacaatgggggcataatacggggccattatttattttcatactatttcctgctgtggtgaggctatcgggtaaagtaacaatcctaccgtaacgtagcaatctctataccataaatgaaacctcaataggtgtatccctattctgaaaaggggataacaaccaggattcaacgcgtgatccacagcgtaggccaggcatccggcccgtgccagctatcgcagctcggttcttcggcataacgcaccagacgaaaacgatcgccatcataacgccagcgcgtctggataccgcagtcggttaacccccgccctttcgccaacgtcaccagctcgcgcgttttctcgtcaaagaaggcgttcatcaactccatgtcattactttcgacgccgcgattaaacggcagccgcaaacgtacggcgcgcgagacgagcgtttttttgcgtgaaactacccaggcgagatcaatagtgttataggcgccggcttcgcagttaacaatcaataacgctttatcatccgtcaacgcgctgacctgcgtctcgcgacgcagcgggtcaagcgaacaacgaatgccgtttacccgccatgctgcgtagtccagcagatcgtcgcgttcttcctcactcagcggtacgggcgttggattaatcacggcgatcccctttaatgccggtgccgggggcacgctgagcggcggttcgtttcctttttcaatccaggcggtttcgctgcccacacgtttttgttgcgcgtcgataaacagtaatgccgcttttaatcccgccagcgaaagcgtctgaacgccgttttttaaggtgatggcctgcgcatcctgaatcgtctgtaaaaatgcggtgatggtggcaggatcgccggtcatgagatgccagggcgacacgcgccagtgtggactgttgaacgaaagcggtttgccatccagcaataagcgaggcgcaattgcggcttctttagcgtcgggcggcgccaaaccgccgcggtcgatacgcagtaccgcatcggtacgcgccccggcgctgcggcttaatgtcatcaccagcccatgatgttcgccagtattgcgcgctacgcaaaaattttggttattgcaggtgacctgccagtcggaaaaagtccgttgcgctggcgcagcccacagtagctggaccggcaacaggccaaacagacaaaaaagaataacgcggtagcgcatgaacggaacaaccccagattcagaacaacacagctaaggcggtatcttccttgcgcgcctcagggttctcaatcagatttatcggattggtcttttttgtgtaaagaaatatatttcttttttttcagtccattagatgagacgtctgtaaatagttaagcaataacacggtcttaccgtcccgaatctcgcctgagcgcaccatttccagcgcccgggaaaacggtagttcaagcacctcaatctcttcgtcctccacgccgccgccgatgctggcacgctcgctatcatgatattcggcaatgaagaaatgaatcagctccgtgacgccgcctggcgacatataaagctcaaatatcttgcgtacctcaccaacgtcataccctgtctcttcaatggcctctttacggatacagacctccggctcgtcgttatcaagcaggccagcgcaggtttcaattaacataccgtcttgattaccgttgacccatgtcgccacgcgaaactggcgaaccagaaccacggtttttttagttgagttgtaaagcagaatggttgcgccattcccgcgatcgtaaacctcacgcttgtgacggataacctcgccattacgacgggtcaggtcataggtaatgttgcgcagagtaaaataattatcagaaagaattttatccttaataagcgtaatggtttgcgacatgctggctccagggtgtaaaaagagcattaatattacgccgtgaggtcggttttgtctgctgaagggttaatccttaatgccgactgaacggacgtacagccatatttttctgtcactgccatgaccatattctgcttctccgggccgcagagtccatgctcgcgatatgatttgacggccggagtgagactgagggaatcatcatgaaatttactctcgttgcgacggttctactgacgttttccctttcagcttttgccgttgagtatcctgtattgaccaccgcgagccctgatcaggtggggtttgatagccaaaaacttcaccgacttgatggctggattcaaaatcaaattgatgccggatatcccagcatcaatcttctggtgataaaagataatcatattgttctacaaaaagcctggggctatgccaaaaaatatgacggttccacgctgttagcccatcccattcgggcgaccactaacacgatgtatgatctggcttcaaacacaaaaatgtatgccactaacttcgcattgcaaaaactagtgtatgaaggaaaaatagatgtcaatgatttggtatcaaaatatatccccggctttaaggatatgcctggggataaaataaaaggcaaaaataaactccgcattattgatattcttcatcacgtcgcgggctttcctgccgacccacaatatcctaataaaaacgtcgccggtaaattattctcacagagtaaaagcactactctggagatgattaaaaagacaccgctggaatatcaacctgggtcgaagcatatctacagcgacgtggattatatgattcttggttttatcattgaatcgataacggcaatgccattagatcgctacgtcgaaaccaccatttataaaccgctcggattaaaacataccgtctttaacccgctgatgaaaggcttcacgccgccgcaaatcgccgcaacggaactacatggcaacacgcgtgacggcgtgattcatttccccaatattcgcaccaatacactatggggccaggtgcatgatgaaaaagcctggtactcaatgggcggcgtttcaggacacgccggactgttttctgacacccatgatatggctgtgttaatgcaagtcatgctcaatgggggcggctacggtaacgtgaagctattcgacgacaaaacggttgcgcagtttactcgccgctcgccagaagacgctacctttggtctggggtggcgcgttaacggcaacgcctcaatgacccccacgttcggggtattagccagtccgcaaacgtatggacataccggatggaccggaacgctgacgtctatcgatccggttaatcatatggcgattgtgattttaggtaacaggccgcactcgccggtagcaaatcctaaagtgaatccgaatgtttttgtcagtggattattacctgcggcgacgtatggctggattgttgaccagatatatggttccttaaaataaaaattaagagcctatctctgtaggcgttattggcgcagccagtttggacacggacagcgcgcaaaaaccggagcgtacacgtagtacgtgaggtttgactcgctacgctcgcccttcgggccgccgcaagcggcgttcaaaacgctaacgcgttttggcgagcactgcccaggaccaaaatggcaagtaaaatagccctaatgggataggctctaagaaggggttctgatagcgtcccttccttcaatttacactctattttcaatactaagattgtcctcatcaggcctgttaaacgtcgccccgacgggaaaatgtttatcgcagggcgttcagccctgcgagcgtcaacatttctgcaaacggagtaaggttagccaataagtttaagattttttatcactcaatcatttaaccgttccaggccttaaccggcctacaaatacgcttatttagctaaccagtcgagtatcccctgcgcagcatgtcggccttctgccatcgccgtcaccaccagatcggcgccgcgcaccgcatcgccgccggcgaaaattttcgggttggacgtctggtaacgaaactcgctctcgacgctggcggcaatacgtccccagttatccaccttcacgccatgcgattccagccacgacataccatgcggatgaaaaccaaacgccataatgaccgcatccgccggcatcacgaactcgctgtccggtacaggtaccgggcggcgtcgcccctgaccatccggttcgccaagccgcgtacgcaaaaagcgaataccgctggcgcgcccgtgcgtatccagcaccaactcaaccggctgaacgttaaattcaaagttcgcgccctcttcccgcgcgtttttcacctcttttttcgaccctggcatattggcctcatcgcggcgataagcgcaggtgacgttagcagcgccatgacgcagcgccgtacgtacgcagtccattgcggtgtcaccgccgcccagcacaaccacgttaaggcccgcagtatcaataaacggctcgtcaggcaacgccggaagccccatcacctgtttggtattggcgatgaggaatggcaacgcatcatatacccccggcgcatcttcattcggtaaatcagccttcatggaacgataggttccaaccccaacaaagacggcgtcataactctccagcagcgtctccagagaaatatctttccctacttcgcagttaagctcgaaacgaatccccatcgcgctgaagatttcccgacggcgcgccagcagagatttatccagtttgaaagccggaataccaaaggtgagtaaaccgccgatttccggatggcgatcgtagacggtggcgcttacgccatggcgcgccagcacgtcagcgcaggcaagacctgccggccccgcgccgataatcgccacgcgcttatcgctcttctgtacgtccgacaggtcgggacgccagcctttgctcagagcgcgatcggagatatagcgctcaatgttgccgatggtaaccgcgccatactcatcgcggagtgtacacgcgccttcgcatagccgatcctgcggacagacgcgcccggtaatttccggcagacagttggtctggtgggaaagctctaccgccgcatcaatatcgccggctttcaccagttcgatccactggggaatatggttatgcagcggacaggtccattcgcagatactgtgttccccgcatgtgaggcagcgggacgcctcacgctccgcctgcgcggcgcgaaacggcagataaatttcctcaaaggtggttttacgcgcttcaatcgccagtttatccggttcgccgcgcggcggcgtcgcctgcatacgctcggctttgctgcttgctgccccactgtgttgtgtatccacggtatgccaggggcgaatctcctgccgggcggtacgcagccgtcgcgttttagccagacgggtcaacgagtcttcggtgaccagttgcagcgcatccgccgggcaattttccacacaggccggcccctgttcacgtccctgacacagatcgcatttatgcgcgctggctttgaactggtttggcgcgacgggcgtcaataccatctgcatggtgccgaatggacaggcgacgacgcaggatttacagccgatgcacttctgcgcattgacctgcacgctgtcgttaatatgcgcgatcgcgccgttcggacagctacgggcgcagggcgcatcttcgcaatggtgacatgtaaccgcgctgcgctggtgctgatgtttaatgacagtaattcggggctgatagcgctgtgacgtcaggacatgtcgctcatcattgtgagccattacgcaggcgacctcgcaggcatggcagcccagacactgctggctattggccataataaaacgattcatggcgtccttctgttttggttgcaaaaaccttattctttatatgagcattgttattaactgacgaaggcggggtcggcaatgttcatctgcccaggaagcacaactatctgtccagaacctgtggcagatcaatttatttcaaagcaaatgaaattgcggttcagctaaatgcggggagtaccagtgtgacggttaaacgcccggtctcggccagtctggctaaggcttttttctatattgtgctgttgtctattctgtccaccggcagcgcattactgacgctgaccagcagtttacgggatgccgaagcgatcaatatcgccggttcgctacgaatgcagagctatcggctgggttacgatctgcaaagccgtagcccgcagattaatgcgcatcgtcaacttttccagcacgcgctcaactcgccggtactgcaaaatctcaacgcctggtatgtgccgcaggcggtaaaaactcgctacgagcgcctgcacgccaactggctggagatgaatagccgcctacaggacggcgacattgcctggtatcagaccaatatcaacaattacgtcaatcaaattgatctcttcgttctggcgttacagcattacgccgagcgtaaagtcatgctggtcgtcgccatatcgctggcgggcggtatcggcatatttacgctggtcttttttaccctacgacgtattcgccagcaggtcgttcgcccgctgaatcaactggtcaccgccagtcagcgaattgaacatggtcagttcgccccgctgccgctggataccagcttacccaatgagctgggattgttggcgaaaacgtttagccagatgtcgagcgagctgcataaactttatcgttcgctggaagcctcggtggaagaaaaaacgcacgatctgcacgaagcgcaccgccgcctggaggtgttataccagtgctctcaggcgctgaataccagccaaatcgacgtccactgttttcgccatattttgcaaattgtccgtgaacatgacgccgcttggtatctggagttaaccgtgggcgataactggcggattagcgaaggcacgcaaagccccgacctgccgatgcaaatgctgccagtgacgatgcaggacacggtctatggcgaactccactggcaaagccccaacgttaatgcctctacgccgctgctgaacagcgtctccacgatgctggggcgtggtttgtactttaatcaggcgcaaaaacacttccagcaacttttgttaatggaagagcgcgcgacgattgcccgtgagctacacgattcgctggcgcaggtactttcttatttacgtattcagttaacgcttttgaagcgcgctattcctgaggataacgccggcgcgcaaagcatcatggcggatttttccagagcgctgaacgacgcctaccgtcagcttcgcgagctactcaccacgttccgtctgacgttacagcaggccgatttaccctccgcattgcatgagatgctggaagatttacagagtcagaccccggccaaactcacgttggattgccgtttacccacgctggcgctggatgcgcaaatgcaggtgcatttgttgcaaattgtgcgtgaagcggtcctgaacgccattaaacacgccaacgcgagcgaaatcgccgtgagctgcgtcaccgcgcctgacggcgatcataccgtttatattcgcgataatggcattggtatcggcgaaccgcatgagcctgccggacactatggtctgaatataatgcgtgagcgcgcggagcgccttggcggcacgctgaatttttcgcaaccctccggcggcggcacactggtcagtatcagttttcgctcctccaacaaggaagagagtcagttaacgtaaagaacggcaaatcgccggaaggccagatgtcaggctttccggcgttggcacaaaaagtatgctgtaaaagcgcatgataatttacattatctcctttatttctccacgtttggctcgtagcttgccgctacagtgaagcagttcaaatctataacgatatgtagaaacacgaggtttccctttaatggcgaatttttttatcgatcgccccatttttgcctgggtgctggctatcctgttgtgtctgacaggggcgttagccattttctctttacctgttgaacaatatcccgatctggcgccgcccaacgtacgtattaccgcgaattatccgggagcgtcggcgcaaacgctggaaaataccgtaacccaggttattgagcagaatatgacgggcctcgataatctgatgtacatgtcatcacaaagcagcggaaccggacaggcgaccatcaccctgagctttattgcgggaaccgatcctgatgaggcggttcagcaggtgcaaaaccagttacagtccgcgatgcgtaaactgccgcaggcggtacaggatcaaggcgtcacggtacgcaaaacgggcgataccaatattttgaccatcgctttcgtctctaccgacggttctatggacaagcaggatatcgccgactacgtcgccagtaatattcaggacccgctcagccgcgtcaacggcgtcggcgatattgacgcttatggttcacagtactctatgcgtatctggctcgatccggccaaattgaatagttttcagatgaccacgaaagacgtgaccgatgcaattgagtcgcagaatgcgcaaatcgccgtcgggcagcttggcggtacgccttcggtcgacaaacaggcgctgaacgccaccattaatgcgcagtcattgctgcaaacgccgcaacaatttcgcgatatcaccctgcgcgttaatcaggacggttccgaggtcaaactgggcgatgtcgccaccgtggagctgggggcggaaaagtatgactacctcagccgttttaacggcaatccggcttccggtcttggcgttaagctggcctccggcgcgaacgaaatggcgaccgcgaagctggtactggatcgcctcaacgagctggcgcagtacttccctcacggcctggaatacaagatcgcgtatgaaaccacctcctttgtcaaagcctcgattatcgatgtggtcaaaacgttgctggaagctatcgcgctggttttcctggtgatgtatctgttcctgcaaaactttcgcgccacgctcattccgacgatcgccgtgccggtagtattaatgggcaccttctccgtgctttacgcgtttggctacagtattaacacattaaccatgttcgcgatggtgctggcgatcgggctcctggtcgacgatgccatcgtggtggtggaaaacgtcgaacgtatcatgagcgaagaagggctcacgccgcgtgaagcgacgcgcaaatccatgggacaaatccagggggcgctggtcggtatcgcgatggtgctgtctgcggtattcgtgccgatggcgttctttggcggtaccaccggggcgatttatcgtcagttttctattaccattgtctcggcaatggtgctgtcggtgctggtcgccatgatcctgacgccggcgctgtgcgcaacgttattaaaaccgctgcacaaaggcgaacagcacgggcaacgcggatttttcggctggtttaaccgtaccttcaatcgtaatgccgaacgttatgagaaaggcgtagcgaaaattttgcatcgcagcctgcgctggattctgatttatgttctgttacttggcggaatggtgttcctgtttttgcgcctccccacctcctttctgccgcaggaagatcggggcatgttcactacgtctatccagctaccgagcggttctacgcaacagcagaccctgaaagtcgttgaaaaggttgaaaactattacttcccccatgagaaagacaacattatgtcggtcttctcgacggtaggttccggccctggcgggaatgggcaaaacgtcgcgcgcatgtttgttcgcttgaaagactgggacgcgcgcgatcccaccaccggctcctcgttcgccattattgagcgggcgacaaaagcatttaaccagattaaagaagctcgcgtcttcgccagcagcccgccggcaattagcggtctgggcagctccgccggttttgatatggaattacaggatcacgccggagcaggccatgacgcgctgatggccgcacgagatcaactcattgagctggccgggaaaaacagttccttgacccgcgtgcgccacaacggcctggacgacagcccgcaactgcaaattgatattgaccaacgaaaagcgcaggcgctgggcgtatcgattgacgatatcaacgacaccctgcaaacagcctggggatcgagctacgtcaacgactttatggaccggggccgcgtgaagaaggtctatgttcaggccgcagcgaaatatcgtatgttgccggatgatattaatctttggtatgtccgtaacaaagacggcggcatggtccccttctccgccttcgccacctcgcgctgggaaaccggatcgccgcgtctggaacgctataacggctattcggcggtagaaattgtcggagaggccgcgccgggggtcagtaccgggacggcaatggatgtcatggagtcgttggtgcatcagctaccgggcggttttggcctggaatggacagccatgtcttaccaggaacggctctccggcgcgcaggcgcccgcgctgtacgctatttcgctattagtcgtcttcctgtgtctggcggcattgtatgaaagctggtcggtgcccttctcggtgatgctggttgtgccgctcggggtcatcggcgcgctactcgctacctggatgcgcgggctggaaaacgatgtttacttccaggtggggctgttgaccgttatcggcctctcggcgaaaaacgcgattctgattgtggaattcgccaacgaaatgaatcagaagggacacgcgctgttagacgccacgctgtacgccagccgccaacgcctgcgaccgatactgatgacttcgctggcgtttatctttggcgtattgccgatggccaccagcaccggggcaggctcgggtagccaacatgctgtcggaaccggcgtgatggggggaatgatctcagcaaccgttctggctatcttctttgtacccctgtttttcgtgctgatacgtcgccgcttcccgctgaagccgcgcccgaaataagatcccggccagcctgatacgaggtgtcgggcacaaaaaaggcgactttcgttgagtcgccttttcttatcccctatgggagcgcggtgccttccaggcatttatttacgaagcatgacttcgataaaatctttccagttccccagttcacgttcaatcataatagcctctcttattattatgggtattctacgtagttagcggtatagagagaagttcatttaaccgattgttgcgatatcctctggttatgctgtctatgatattactatggcgctgtagccataaattttatgtgacttactgcaatatttagcaacattaataccttttctactactttatcaaattgggttaaaaaacaaacaattgcatatgcacaaaataggatttataccgcgaagtataaacaagccacatctggaacgttttggaatcattattcacattcactcaacaatgttatattgattgccgatcagcgctggataaataaccataaacggccacacttattatcccgcagacgatactattgattatttattcgaatttcgcgttaaaggattcaatatgattaccctctatggcattaagaattgcgacacgatcaaaaaagcgcgccattggctggaggaacatggcattgattatcgttttcacgattaccgtgtggatggcatagacctccctcttcttaatacctttattgccgaactcggctggcagcctttactgaatacgcgcggcacaacatggcgcaaactggatgaaggccaccgcagcgggattaccgatgccgactccgccgctgctctcatggttgaacagccggcaatcatcaaacgcccattgctctgcgcgcccgggaagcctatgctgcttggtttcagtgaatcccgttatcagcagttttttgatgaggtgtagtctatgtcgtgcccggttattgagctgacacagcaacttattcgtcgcccctccctgagtccggatgacgcaggctgtcaggcattaatgattgaacgcctgcgtaaaatcggttttaccattgagcatatggattttggcgacacgcaaaatttttgggcatggcgtgggcgtggcgaaacgctggcgttcgccgggcatactgacgtcgtaccggctggcgatgtcgatcgctggatcaatccgccgtttgagcctacgattcgcgacggaatgttgttcggtcgcggcgcggcggatatgaaaggttcactggcggccatggtggtggctgctgaacgttttgttgcgcagcatcctcatcaccggggccgcctcgcatttttgattacctctgatgaggaagccagcgcaaaaaatggcaccgtaaaggtggttgaagcgctgatggcccgtaacgagcggctggattactgtctggtcggcgaaccttccagtactgaaattgtgggcgatgtcgtcaaaaacgggcgtcgcggttctctcacctgtaacctcactatccatggcgttcaggggcacgtcgcctatccgcatctggcggataaccctgttcatcgcgccgcgccttttcttaatgaactggtcgctatcgagtgggatcggggcaatgactttttcccggccaccagtatgcaggtagccaatatccaggcaggcaccggcagcaataatgtcattcccggcgaactgttcgtgcagtttaacttccgtttcagcacggaactgaccgatgagatgatcaaagagcgggtacatgcgctgcttgaaaagcatcagctacgctataccgtagactggtggctttccgggcagccgttcctgaccgcacgcggcaagctggtggacgcggtggtaaacgccattgagcactataatgaaattaaaccgcaattactgacgacgggcggtacgtccgacggacgttttatcgcccgtatgggagcgcaggtggtagaactggggccggtgaacgccaccattcataaaattaatgaatgtgtgaatgccgccgatctccagctactggcccgtatgtatcaacgcattatggaacagctcgtcgcctgatgagcgttccggtaagaggaaataagcatggactggctggcaaaatattggtggattctggtattggtgtttctggtaggcgtactgctgaatgtgatcaaagatctcaaacgcatcgaccataagaaattccttgccaataaacctgagctgcccccgcatcgcgattttaacgataagtgggacgatgaagacgactggccgaagaaagatcagccgaaaaagtaaccggatatcatgccggacaggtatcgctatccggcatggtccccaccgccgggcattacgtcgcgcaaactctgcgttcgtccggcatccaacgcaattagcgcctgcgccgcctgcgcacgctgcaacgccagcagagctttacggcctgaaatgcgtagccgggcgcacagttcggcatcgctggctttttcttccagccgccctctcagcgccggtaatggcaatgcgctgtattgcagtaaacgatgcaggcaacctaacgatgtcagtagcggacggtgcgcgaacgcaaaaccgaccagctcacgccagtcttcatcattaagcgcctgttcgcgcaacgccgccagcggtatcgcctcgccgttccactgcgtcaggatatccgcatcgcggcgcaaacgccggtgttcctgctgcgccagccgttttcccgcgtcgctcagcggcaataacgccatcgccgtatagcaaccgctgctcgcctcccgatggttgcccatccgtaccagtacaaagccgcagcgttgccagaaacgccacagcttcggcgtatagccgaagctgacggaaagataatcacactgcgccgcctgcatgcacgcgcaggcaatcaactgctgaccgatgccttcacgctggcgagcggggtgcactgcgatacggcttacgcgacgcccaaccagcgtcgcggctaaagggtcgctaccgtgcgccgccagcgactgcgccaccagattcccacgcggccgccggaaaccgcaccatacagcctgactgagttctgcggataacccgccctcttcgaccagccagagggcgcccgccacacggttattcgccgtagcctgcaagaaatgctgtcctggcgcatccatcattcggcgcagatccagcggcgaagtacgatagtgcgcccccgacagtaactgatacacagccctcggcaacgcgggcgtattcacccaggcctgttggtaaaacgccgagatttctatcgcgccatgtggcgcctgcgcaaacgcttcatcgtcgaatatcagcgcctcgctgacgatattttccagcgggcattctggcgcccagcggacaggctgacgaagcgtgaagcggtgaagctgcggaaaacgggcgcaaaacttaagtaaaaaaccgcgtccggtgccttcgtagccctgaacggtggtggtgagtagtatgcggggaaagcgcgaaaccagttgcagcagcagcggcgtggggattgccgccgcctcgtcaaccaccagccagtcggctcttgccccgctcgccagcaacgcatccggcgccataaagcagaaccgctcaccggcaaacgctgccaggatatccgttgccgttttcgccggtgcggtcacgatagccgtgcccgccatccgggagatgaattgcccggccagcgccgatttgccgcgcccacggggggcaatcaccgtcgccacgccgggcggcatttcacgtaaacgcgataagatagccgcctgctccggctgcggctcgccggtggcgggtcgccagcattcacgggaaggataagatggccagcaaaacggctggcgctgtcgccaaagcagcgtttgcggatcgcgggagagagtccgtttaagatgctgtgcaaactgcggtgtggggataggctgcgcgcagtcgctccagcgcagtgaatcggtatcaggcctgctttcccacgtctcgtacggcggcatcagcagaagcagccagcttccggcctgcaaggtcccgctcagggcggcaaacgctgcggcgtcaaagccctgccaggcatcaaatatcgcatgacggaattcacggcccagcagcgtttgtaacgcctgtggcgtacagcacggctgggcgggcgcgtcaggcgcgacccacagccagtcaccgggcaatgcagcgcgtatcgcctcggcccgcttccggcaccacgccgcatcgccgctgatgaccagtaaacggcgaatgccttcctgtgtcatttgcgacgttaacgcctgtagcgcatcgatatcagacatccctgccccggtttatcaaaagtttttgccaaacgtattacattgcgccgggtcaccgctgtcaaatccacgcttaaaccagctgtagcgctgttctgaggtgccgtgagtaaaactatccggcacgacgcgcccctgcccctgttgctgtaagcgatcgtcgccgatagcctgtgcggcattgagcgcctcttccagatcgcccgcctccagtacgccttgctgctgcatactgtgtccccacacgccggcaaagcaatccgcctgtagctccatgcgcaccgaaaggcgattcacctccgtttgcgacgcgttttgctgcaactggcgtactttcggctcaatacctaacagtttttgtacgtggtggccgacttcgtgggcgatgacataaccctgggcaaaatcaccgtccgcgcccagcttatttttcatatcatcgtaaaatgagagatcgatataaacggtgccgtccgccgggcagtaaaacggccccatcacggactgacccgcaccacagccggtgcgcgtcataccacggtacatcaccagttttggctgctgatagccgcgccccattttttgaaagagttgaccccaggtatcttcggtcgtcgccagaatcaccgaggtaaattttgccgcttcatcatcattggggcttatcgaacgcgtcgactgctgctgcgaaaccggctggccggtcaacagaccggttaaatccaccccatagtaccctgcgaccaacaccaccaccaacagaatgatgccgccttttccgcgcggaagacgaaagcctgggccacccagcgaggggccgcctggccgattacgtctgtcctctacattgttgctttcacgacgcccttgccagcgcataatcacctcattctctctttgttatacagatgatcgtaggcggtcaggcgcaggattaccacaggtaaacgctatcagaatgaggaaaggatgataccggagagcggttgccccccggtcagaagcggaattaatctaatttcacgcccaggcgatgcgcgacggcttcataggcttcaatcagaccgcccaggctctggcggaagcggtctttgtccattttgtccagcgtctctttatcccacaggcggctaccgtccggcgaaaactcatcgcccagcaccacttcgcctttatacaggccaaactccagtttgaaatccaccaggataagacccgcgtcatcaaacagttttttcagtacgtcgttggctttgtaggttagctctttcatacgcgccagattttcctgacttacccaaccgaacgtttcacagtaggaactattcaccatcgggtcgtgcagcgcgtcgtttttcaggaacagatcgaatatcggcgggttaagctccatgccttcttccacgcccagacgcttgaccagcgacccagccgcacggttgcgcaccacacattcaaccggcaccatctccagcttcttcaccagacactcggtatcagacagcaaacgttccatctgggtcgggatgcccgcctcggccagtttggtcataatgaaatggttgaatttgttatttaccatgcccttgcgatcaaactgttcaatgcgcgcgccatcccctgctgacgtatcattgcggaattcgagcaccaacaggtccgggttttccgtgctgtatacggttttcgctttaccacgatacaactcagcttgcttttgcatctttaacactcctgggtgtgaattaacgataagtattcatttcctgctacgcctgccggagacgccggcctgtaattgtggtgcgaaatagcggttaaatcgcgtttttgtaccgacgcacacgtttgcgtatcttatcagaaaaaagggccggattgctccagccctgttaaattacttgttgaacgctgcctggaagacggcaaccagcgcgtcgttctggctttgcgtcagagtatgccccttaggatcgataaactgcaagctgctgcggttatctaaatcgccaacctgcaatttatagtctccggatgccaggcccgggtcgctagcgcccagatcccgccagtcgctgtcagacaacggtttgtacgttaccgccatgctgccctgagagcgagtgctgtcggtgactttcatgcccactttttccagcgcggccgggaggcgctgccacacgaggttgaacggaccgcgaacgaccagcataggtaaaccggtatcatcagcggcgctctgcacatccatcgttgcggcggaacggttctgcgcggcatttgccgcatccgtagcggtcttatccagaccggcggaaatgacgttcatcatttccgtgctatagcgctgcagcgacgccgcgtcagcgaccggcttgccagcctgttccagattaaccagttttaccgttaccgcctgctgatagccctgcggcttcaccgagatttgataacgtccacgatactgttcgtcttcatccaggcgattccagttcacccaatcggtcgtcagggtctggctggcatcgtcacgtttttcaatcggataatttttcgcctgaatcacgctgacgacttgcggccacagcgtgctgctccggccattttccaccaatagcgtagcggtatcgccagagaactgggtacgcgcgccgctcactaacgctaacggctgcgccggcggacggatatccaacgccttaccaaccgcgccgctccccttcgtgaccggaataacgtagtcgccggtcgttatcggcaggatcattcctgccggggcgtgaagttcagcaagcggcgcggcatccagataggattcatcgccgcttacctggcgcttgtagcgcgaatcggaactacaggcagcgagcagcaaaacaagcgaaacacccgcaaccttcgccaggcgcgacttttgtactgagtaagccatcaaatctccctaaactttacagcaggccagcatgctgaagcgctgctttgacgatgtcacgaccatggtccgtgataggcgtcattggcaggcgcagcgtgtcggtcgccacaagacccaatgccttacatgcccatttcaccgggataggattgggttcgacaaatagtttgttgtgtaacggcatcagacgctggttgatagcgcgcgcctcggcaaattgcccttccgccgccagtttgcacatgtcagccatctcgcgcgccgctacgttagccgtaacggaaatcacgccatgaccacccagttgcataaagtccagcgcagacgcgtcatcgccgctaagcagaataaaatcgtctgaaaccagctctttgatctggtgaacgcgggttaagttccctgtcgcctctttgatagcgataatattttttatttccgccagacgacccacggtttccggcaacatatcgcaaccggtacgggacggcacattatacagaatttgcggcaagtcagtgtgttccgcgatggctttgaaatgctggaacaaaccttcctgcgtggggcgattgtagtacggcgttaccgtcaggcagcctacaataccgctatcgttaaaacgctgcgtcaggctaatcgcttccgcggtcgcgtttgcgcccgtgccggcgataaccggaatacgtccgtcagccagttccagcgtcatcatcacgacatcgccatgttcatcatggcttagcgtggcagactcgccggtagtgccaaccgaaacaatcgccgaggtaccgttggcgacatgataatcaatgagttttttcaggcaagacctactgacgttacctttctcatccatcggcgtaacaagcgcgacaatacttcccgtgaacatgggccatcctctgtgcaaacaagtccctcaatggtacgtttggtatggcaataaaagcaagcgaccaaagccgttctgattgttgtatgcaggttttttttatggtttccttaagattacctcaccgctcaaaggaataactggtttgacaccgtcatcacaacactatttggttatcactgcgctgggcgccgacaggcccggtattgtgaataccattactcgccatgtcagcagttgcggctgtaatatcgaagacagccgactggcgatgctgggcgatgaattcacgtttattatgctgttgtccggcacgtggaacgcgattaccttgattgaatcgacattgccgttaaaaggcgcggagctggatctgctgattgtgatgaaacggacgtccgaccgcccccgcccggcaatgcccgcgacggtatgggttcaggttgaggtcgccgactccccgcatttaattgagcgattcaccgcgctgtttaatagtcatgaaatgaatattgcggagctggtctcccgcacgcagccggctgaaggtgataaagctgcgcaattatttattcaaatcaccgcacatagcccggcgtcgcaaaattccgcaaatattgagcaagcctttaaagcactatgtacagaactcaatgcgcaaggcagtataaacgtcgtcaattactcacaacatgatgaacaggatggagttaagtaatgaatccactgaaagccggtgatatcgcaccgaaatttagcttgccggatcaagacggggaacaagtaaatttgaccgacttccagggacagcgcgttctggtttatttctacccaaaagccatgacacccggctgtaccgtgcaggcctgcggcttacgcgataacatggacgagctcaaaaaagcaggcgtggacgtgctgggcatcagcaccgataaacctgaaaaactctcccgtttcgctgaaaaagagctgctgaactttacccttttgtccgatgaaaaccatcaggtgtgtgaacagttcggcgtctggggcgaaaagtcgtttatgggcaaaacgtatgacggcattcaccgcatcagctttttgattgacgctgatggtaagattgaacacgtctttaatgattttaaaaccagcaatcaccatgatgtggtgctgaactggctgaaagaaaacgcgtaaaagcctcaggccgcgctgatgtgcggcctggaaagggaatgcgccgtcaggcttgccgcgccagacgcccttctccggtcatcaccagatcggcatctttaaccgcctgctcaagctgtagcgtttccacgacaatctctacgccggcgcgtaattcagcattgagcaaccctaaaagcgcggcgcccattccgcctgccgcgccgggagcgttaatcacctcacgtcccgtagcctgataaatatgccggccgcagttttccagcgcctcgtccagggtgttcaccatttccgctgtcgcccctttttgtgggccaaaaatggccgatgcgccctgaggaccacacagcggattgttgacatcgcacgcctttaagctgattggcggtagcggaatcaatttctacaatacagttttccttcagcagcgagaattttgtaggttccgacaataaaaatgccgcaacacggtgcggcattaaaaaaaagagcggctttctaagcgcttgtccctcatcaggcgtgcgcaaaatggcggcagggcactatgatgtcgttcacgctttacaacttttgtactgaccgctcaggatgaggcatccgtcacctgaccatccggccaggcatggacaacggctttaatcagcgtcgccaatggaatggcgaaaaacaccccccagaaaccccacagaccgccgaaaatcaccactgacagaataatcaccagcggatgcaaattcaccgcttcggagaaaagtaccggtaccagcaaattgccatccagcgcctgaataatgagataaacggcaaaacagctccagaattccgtccccagaccaaactgaaacagcgcgacgcccaccaccggaattgtcaccacaaaggcgccgatataggggatcagaaccgaaaagcccaccagtaccgccagcagtagcgaatagttgaggccaaacagcaaaaaacccagccaggtcgctacgcccaccaccaccatctccagcacttttccgcggatatagttggtgatctgctgattcatctcattccacacctgccccgccagcccgcgattacgcggcagcacgcggcgcacggcattcagcatctgctctttatcttttaccaggaaaaagaccatcagcggcaccagcaccagatataccgccagcgtcagtagcccgactaacgaagccagcgaatacttcaccaccgaatcgcccatgttaagcatccgggtacgcatgttttccgccatcgcatcaataatgcccgcatccatcagcgccggatagcgtcgcggcaaggtcgcggcgaaatcggacagtttattcagcataccgggcatatcacgaatcaggtaaataccctgctgccaggcaatcggcatcaccacaaacgccattaataacagaatgccgacaaaaaggataaggacaatggaggctgcccagcgccgggaacagccaatcgcctgcaggcgcgccgtcggccactccagcaggtaggccagtacgatagcgaccagcagcggcgctaacaggccgctaaagaaaaagaggatgctaaaaccagccaccagaatgaccagcaaggcaatcgcctccgggtcgctgaagcgacggcgataccattgcattaacatttcgagcataaaacccttcccagaactcaactgcgggattgtgatgccgaattgtatcgaaatgtcacaaaaaagacttcgctttttatcgttgattcaggaaactaaaatagtgagtctgtgctcatcacagttacacttatgaagtgtcggagcgtggaacgatatttcacgacgttggtcaaagggctatctcaaaacaacaggatagaggttatgttcaggcagttgaaaaaaaacctggtggcaaccctcattgcagcattggctctcggtcaggtcgcgcccgcatttgccgaccctgccgacacgctgcccgatatgggaacctcggcaggaagcacgctttctatcggacaagagatgcaaatgggcgacttttatgtgcgccagctacgcggcagcgcgccgttaatcaacgatccgctgctggtgcaatacattaacgcgctgggtatgcgtctggtctcgcacgccgactccgtcaaaacgcccttccattttttcttgatcaataatgacgaaatcaacgccttcgcgttctttggcggcaatgtggtgctgcactcggcgctttttcgctacgcggataacgaaagccagctagcttcagtcatggcgcatgaaatctcccacgtgacgcagcgccacctggcgcgcgcgatggaagatcaaaagcgcagcgcgccgcttacctgggtgggcgcgctgggttccattttgctggccatggccagcccacaggccggtatggcggcgctaaccggtactctggcgggaacgcgccagggaatgataagtttcacccagcaaaatgagcaagaagccgaccgtattggtattcaggtactgcaacgcgccggatttgacccacaggcgatgccctctttcctcgaaaaactgctcgaccaggcgcgttactccacgcgcccgcctgaaattttgctcactcaccccttaccggaaagccgccttgcggatgcccgcaaccgtgccaaccagatgcgcccggtcgtggtgcaatcttccgccgacttttatttcgccaaagcgcgcgccctgggaatgtacaattccggacgtaaccagcttaccagcgacctgctggatcagtggtctaaaggcaacgtgcgtcagcaacatgcggcgcaatatggccgggcgttgcaggcgatggaagcgagcaagtacgatgaagcgcgcaaaacgttgcagccgctgttaagcgcggaaccgaacaatgcctggtatcttgacctcgccaccgatattgacctggggcagaaaagagccaacgacgcgattaatcgcctgaaaaatgcccgcgatctgcgcgttaatcctgtgctgcagttaaacctcgccaatgcgtacctccagggaggccagccgaaagcggcggaaaccattctgaatcgctacacctttagccataaagatgacggtaacggctgggatctgcttgctcaggccgaagccgcgctgaacaaccgcgatcaggagctggcggcgcgcgctgaaagttatgcgctggcgggacgactggatcaggcaatttcactgctcagtagcgccagcgcccaggcaaaactgggtagtcagcaacaggcgcgttacgatgcgcgtatcgaccagttgcgccagttacaggaacgcttcaagccatacacgaaaatgtaatcgccgtttattagccggatggcgtcacaaggagaactcatgaccgacacgattaaaatctaccataacccgcgctgctcgaagagccgcgacacgctgaacctgctgaaatctaacggcgtggaaccggaagtggtgctttatctggatacgcccgccgatgccgccaccgtgcgggaactgctgcgtatgttgggcatgtccagcgcgcgcgaactgatgcgccagaaagaagatctctataaaacgcttcacctggcggatagtgagctgagtgaagaggcgttaatccaggcgctggttgaacaccctaaactgatggagcgccccattgtggtggcaaatggtcaggcgcgcattggccgaccgcctgagcaggtgctggacatcctcggttaaccgttgaacgccgccgtcgcggcgtattacagtttcaggatctctttgacaaacgggatcgtcagttttcgctgggcagtgatcgacgcatgatcgagctgatccagcgtcataaacagcgtgcgcatttcgcgatcaagacgtttgagtaaaaaccgcccgacatcttccggcagttcaaacccccgtaaccgggcgcgcaactgtagcgcctgaagtttgtcttcatcggaaagaggctggagtttatagatttgcccccagtccagacgggaagcgagatcgggcaagcccagatttaactgtcttggcggacgatcgccggtgatcaataaccgcgtcttaccggactccagaatgcggttatagagatcaaagatcgccatctcccacagttcatcgccagcgacacactcaatgttatcaatacacaccagcgagaggtgttccataccgtcgagcacttccggcacgaaccaggtacgtttatcgagcgggacgtagcctaccgcatctccacgctgcgacagttcagcacaggcggcgtgcagtaaatggctgcggcccgcgccttcacgcgcccaaaggtagatatatccactatgttcctggcgcaacacgttttgtaacgcggccagtagagaggcgttatcccccggccagaaacttgcgaaagtttcgtcgtcaggaagataaagtggcaaagagagctgtgccggtgtgttcagagatacctcaacccaggatgacataaaatcgcgctgagtttaccacataattcccgtgagatagaaccgggcagcatcgctgcccggcaacccgttactgatgcgggggctccgcatcatttgcctccagtaccacttcttccggacgcaacaggctaatcagtttaaaaatcaggctcaggcaaatcccgacgatggtcgccagcgccatccctttcaattctgccgcgccgatatgcactttcgcgccgctcacgccgatgatcaaaatcaccgaggtgaggatcaggttttgcgctttgttgtagtcgactttcgattcgatcaagacgcgaatccccgacgcgccgataacgccgtacaacagcagcgagacgccgcccatcacgggtaacgggataatctgaatcgccgccgccagtttgccaacgcaggaaagcagaatggcgaaaatcgccgcgccgccgataacccaggtactgtaaacgcgggtgatcgccatgacgccaatattttccccataggtggtattcggcgtggagccgaagaaaccggaaatgatcgtcgacagtccgttagcgaacatcgagcggtgcaaaccgggatcgcgcactaaatcttttttgacgatattcgccgtcaccaccagatgaccgacatgctcggcgatcacgaccaacgccgcgggcagaatcgtcaggatcgcgaaccattcaaaacgcggcgtatagaaggtcggcagcgcaaaccagtgcgcctgggcaatcggcgtggtatcgaccacccccagcgcgaatgacagcgcatagcccgccagcacgccgatcaaaatcggaatgatcgccaggaaaccgcgaaacagtacggagccgaacaccgtcaccgccagcgtgaccatggagatgataattgttttcgtgtccggcgactgcccttgcgcaggcagtaatccggccatccccgccgcgacgccagccagctccagaccgatgacggcaacgattgcgcccattgccgcaggcgggaacatcacatccagccagccggtgcccgcttttttaacgatgaaagagaccagacagaacaacacgccgcacataataaaaccgcccagcgccacttcataacccagcggcaacaacagtaataccggggaaataaaggcaaagctcgatccgaggtaggcaggaattttacctttgcagataaagagatacagcaacgttccgataccgttaaacagcagcaccgtcgcgggattgatatgaaacagaactggcaccagcacggtcgcgccaaacatggcgaaaaggtgctgtaaactaagcgggattgtctgtaaaagcggcggtctttcactcaccccgatagcacggcgcgtcatagtgttttcctctaagtgtgtttgttatgagtggttttattcaaaaaaaagccgactcttaaagtcggcttttaattatttattcacttatttggtaccaaaaatcttatcgccggcatcgccaagccccggaataatgtatccgtgctcgttaagcccctgatcgatagaggcggtgtacagttcaacgtccgggtgcgctttttccagcgccgcaatgccttccggcgcggcgaccagcaccagcaccttaatgctgctacagcctgcttttttcagcaggtcgatggtcgcgatgacagaaccgccagtcgccagcatcgggtcgacgatcagcgccatgcgctcatcaatgttcgataccagtttctggaaataaggtactggctcaagcgtctcttcgttacggtacatcccgactacgctgatacgcgcgctcggtacattttccagaacgccttccatcatacccagacccgcgcgcagaatcggcacaacggtaatttttttacctttgatctggtcgatttccaccgggccattccagccttcgatggtgactttttccgtttccaggtcggctgtcgcttcatacgtcagcaggctgcctacttctgaggcgagttcacgaaagcgtttagtgctaatgtcgttttcacgcatcagacccagcttgtgtttgacgagtgggtgtttgacttccacgatcttcatactcttctcctatcctcagatgactggcaaccacaaaaaaaatcgccggattataccgcttttcctctctgacgcaacacaatgtatgcttgacctggatcaaccaaaagcgctgatagcggaaaagtgagtataaatcactcacgttgaaacaggcgataaaggctaacaaccgtttgaatattagcaattttaagggtgaatgacctgtcccgaccgcctgtcgtaaaccaagtgctggatatccttttcttttttaccaacagggaaattttcaagcagcgaccgaaaccatgcaaaaaaaatcgcccggataaccagggcgcagaccacgctcgcaaacgtttgctttccctgttagaattgcgccgaatttaacttttaccgcaagaaaaaacgtggggaaccaggcagtgaccgataagacctctcttagctataaagatgccggcgtcgatattgatgcgggtaacgctctggttgatcgaatcaaaggcgtagtgaagaaaactcgccgcccggaggttatgggcggtctgggcggtttcggtgcgctgtgcgcgttgccgcaaaaatatcgtgaaccggtactggtttccggcactgacggcgtaggtaccaaacttcgcctggcgatggacttaaagcgtcacgacgctatcggtattgatctggtggcaatgtgcgtaaacgatctggtcgttcagggcgcggaaccgctgtttttcctcgattactatgccacgggtaaactggatgtcgataccgccgccagcgtgatcaacggtattgccgaaggctgcctgcaatccggctgcgcgctggtcggcggcgagacggcggaaatgccgggcatgtatcacggcgaagattacgatgtggcgggtttctgcgtcggcgtagtcgaaaaatcagaaatcatcgacggctcccgggttgccgaaggcgacgtgctgattgcactcggctccagcggcccgcactcgaatggatattcgctggtgcggaaaattattgacgttagcggctgcgacccacaaaccactctgctggaagggaagccgctggccgatcatctgcttgaaccgacccgtatctacgtaaaatcggttctggaactgattgaaaacgtcgatgtacacgctatcgcccacctcaccggcgggggcttttgggaaaatattccgcgcgttctgccggagaatacccaggcggtaattaatgagtcgtcctggcagtggcccgccatctttacctggctgcaaaccgccggtaatgtcagccgacatgaaatgtaccgtacctttaactgcggcgtcggcatggtgattgcgctctccgctccggaagcggacaaagcgcttgctctgctaaacgagaaaggtgaaaacgcatggaaaatcggtatcatcaaagcctctgattccgaacagcgtgtggttattgaataatgaatattgtggtgctgatttccggcaatggaagcaatttacaggcgattatcgatgcctgcgaagcgaagaaaattaaaggcaccctcagggcagtattcagcaataaggccgacgcgttcggccttgaacgcgccagagaagccggtattccggcgcaagcgctgactgccgatcggtttgacagccgcgacgccttcgatcgcgagctgattcgcaagatagacgcgtatgcgcccgatgtggtcgtgctggccggttttatgcgtattctgagtccgatgtttgtcgcgcattactacgggcgtctgctgaacattcacccttccctgctaccaaaatatccggggttgcatacccatcgccaggcgctggaaaacggcgatgaggagcacggtacctcggtacatttcgtgacagacgaactcgacggcggcccggtcattctccaggcgaaggtgccggtttttgccaacgacagcgaagatgatatcaccgcacgcgtacagactcaggaacatgcgatttatccgctggtgattagctggtttgcgcaggggcgtctaaagatgcgcgataacgccgcctggctggacgggcgtcgtctgccgccgcaaggttatgcgtctgacgaataatatgtcatcggacaggactgcgtctgcttgccggatggcggcataaatgcctatccggcctactcttttcccttcctttatgctatcagtttattgtcatatttttctgacgctgttggacattaacgcgtaatgctcgccataattatcaggcagtgtcccgtgaataaaacggagtataggtagtaatgggtcaggaaaagctatatatcgagaaagaactgagctggttagcatttaacgaacgcgtgttacaggaagcagcggataaatccaacccgttgattgagcggatgcggttcctgggaatctattctaataacctcgacgagttctacaaagtgcgtttcgctgaactgaaacgacgtattattatcagcgaagaacagggttcaaattctcattcacgccatttgttaggcaaaattcagtcccgcgtgttgaaagcagaccaggagttcgacggcctgtacaacgaattactgctggaaatggcgcgtaatcaaatctttctgatcaacgagcgtcagctctcggtgaaccaacaaagctggttgcgccactattttaagcactatttgcgccagcatattaccccgattctcattaaccgggagacggatcttgttcagtttttaaaagatgattacacctatctggcggtggagattatccgtggcgacaccatcaactatgcgctgctggagataccgtccgacaaagtcccacgcttcgttaatctgccgccggagacaccgcgcagacgcaagccgatgatcctgctggataatattctgcgctactgcctggatgacatttttaaagggttcttcgactatgacgcgcttaatgcctattcgatgaaaatgacccgcgatgccgaatatgacctggtgcatgagatggaatccagtctgatggagctgatgtcttccagcctgaagcagcgcctgaccgctgagcctgtgcgctttgtctatcaacgcgatatgcccgccgcgctggtcgacgtactgcgggaaaaactgacgatctcccggtatgactcaatcgtacccggcgggcgctaccacaattttaaagactttattaattttccgaatgtcggtaaagccaacctggtcaataaaccgttaccgcggttacgccatctttggtttgataaagagaagtttcgtaacggtttcgacgcgattcgtgaacgtgatgtgctgctctattatccttatcacacctttgaacatgtgctggaactgctgcgtcaggcgtcgtttgacccaagcgtgctggcgatcaaaatcaatatttatcgcgtagcgaaagactcgcgcattattgactcgatgatccatgccgcccataacggcaaaaaagtcaccgtggtggtggagttgcaggcgcgcttcgatgaagaggcaaatattcactgggccaagcggttaaccgaagcgggcgtccatgttattttctctgcgcccgggctgaaaattcacgccaaactctttctcatctcacgaaaagagggtgatgacgtggtgcgttatgcgcatatcggcaccggtaacttcaacgaaaaaacagcgcggctgtataccgattattcgctgctgaccgccgatgcgcgcattaccaatgaagtgcgtcgggtctttaattttattgaaaacccctatcgcccggtcactttcgattatttgatggtttctccacaaaactcacggcgtctgctgtatgagatgatcgatcgtgaaatcgccaatgcccagcaaggcttaccgtcagggattaccttaaagcttaacaacctggttgataaagggttggtcgacaggctatacgccgcgtcgggttcgggcgtccaggtcaatctgctggtacgcggtatgtgttctcttattccgcaactggaaggcattagcgataatattcgtgcgattagcattgtggatcgctatctggaacacgatcgggtttatattttcgaaaacggcggtgataagcaagtttggctctcttcagctgactggatgacgcgtaatattgactaccgtatcgaagtcgctacgcctatcctcgacccgcggcttaaacaacgcgtcctggatatcattgacattctgtttagcgacacggtaaaagcgcgttttatcgataaagaactcagcaaccgctacgtaccgcgcggcaatcgccgtaaagtccaggcgcagctggcaatttatgactacatcaaatcactcgagcaaccagactaacgctatgccaatttacgataaatcccctcgtccgcaggagttcgctgcggtcgatctcggctcaaacagctttcatatggtcattgcccgcgtggttgacggcgcaatgcagattatcgggcgcttaaaacagcgcgtccatctggcggacgggctgggcgcagataacaaactcagcgaagaagccatggaacgggggcttagctgtctgtcgctgtttgctgaacgcttacaaggtttctccccttccagcgtctgtatcgtaggcacccatacgttacgtcaggcgcaaaatgccgctgattttctcaaacgcgcggaaaaggttattccctacccgatagagattatttccggtaacgaagaagcgcgcctgatttttatgggcgtagaacatacgcagccggaaaaaggccgcaagctggtgatcgatatcggcggcgggtcaacagagctggtcattggcgaaaacttcgaacccaggctggttgaaagccgtcgtatgggctgcgtgagcttcgcgcagctctactttcccggcggcgttatcaataaagaaaacttccagcgcgcccgaatggcggcggcgcaaaaactggaaaccttaacctggcagtatcgtattcagggttggaacgtagcgatgggcgcttccggtacgattaaggccgctcatgaagttctcctggcgctgggtgagaaagatggcttcattacgccggagcgcctcgataaactgaagtcagaagtgttgaagcaccgctcctttaatgcgctcagcctgccgggtctgtctgaagaacgaaaagcggtctttgtgccgggcctggcgattctgtgcggcgtttttgatgctctggctatccgcgagcttcgcctttccgacggcgcattgcgcgaaggcgtactgtatgaaatggaaggccgcttccgccatcaggatgttcgcagccgtaccgcaaaaagtctggccaatcaatacaacattgacagagaacaggccagacgcgtgctggaaaccaccatgcagatgtacgagcagtggcaggcccagcagccaaaactggcgcatccgcagcttgaagcgttgcttcgctgggcggcaatgctgcatgaggttggactgaatattaatcacagcggtttacatcgccattcggcttatattctgcaacacagcgatttgcccggctttaatcaggagcagcaaatgatgatggcgacgctggtgcgttaccatcgtaaagccataaaactggatgatatgccccgctttacgctgtttaagaaaaaacagtatctgccgttaattcagctacttcggctgggcgtattactgaacaaccagcggcaggcgaccaccacgccgccgacgctgcggctaacgaccgatgacagccactggacgttatgttttccgcatgactggttcagccagaatgcgctggtactgcttgatctggaaaaagaacagcagtactgggaagcggtaactggctggcgtctcaatattgaggaagaaagctcgccggagatcgccgcgtaaattgtgagccagacgccgcgccgcggcgtctgtctttactgaatctcagataatagctgcggctcgccaattaaatatccctgaagatagtcgatccccaacgagagcactacgcttcgtatttcttcgctctcgacatactccgcgacgacctgcatatttttcattcgcgctaaatgacaaatagaagccacaatctgataatcgagactgtttgacactatattgcgaataaaactgccatcaattttaagaatatcggcgtcaacgtttttcagccgcgcatagctggcgtagccagtaccgaaatcatcaatcgctatctgacagccaaactgctgtagctgtcccagcgtcaactgcgcctgctcagcattggtgagagagttgctttccgttacctcaaaaaccagttgccagggttcaacctgatattgcgtaagcagctgcttaacttctgcagggaaacgagcgcggcataccgatgttggcgacagattaatggcaaaacgatgcgcgggcatatattcccggctggccgccataaaccgcagcgtgttttcaatcacccaaagatcgatagcggaagacaatccaaactcatgcgccacgggtaaaaaattgtccgggttgataacgtcgccgttgtcatccctgagtcgcagtaagatttcatggtaaacgtccccacgaacaccgaaaataggctgcgccatcaggaaaaaatgatcgtgctccaacgcctgttgcaggcgattcatcatcgcaattctgcccttcaaatcgcgctgcaggtgcattgcgccgcgccgctgtaaatcctccggcgcgttagtcgtcaacgaaagatcggaactggtgcttaattcgcccaacagcagataaaggtggctaaccggagaacgcacgcagcaatagctcacgccgacaggcggctgtagcggcagtccatcccagataaaccgaaactgcttaatatgtttatccagcgcttcaatacgctgctgatgcgcctctgtattaagacgcagcaccaggtcgtgccctgacatctggtagacgcactcatttgaggccagcatcggcgtaatccagtgagagagcttttgcttatactggatgcgtagcatgacgccataatttttacccaatagctccaggcccggcacgtgtaaaaaacagatcgtagaccagggcgcattttggagcgcgcggtttaacgcacgtaaattgggaagatgtacaaccgggtcaagataggccagccgccgtgcgcgaccactcactacgcgctgacgcgtggccagtacagacatataattaacaataaaagaaaaaaccagatagctcgaagaggtaatcgctaattgcgtatcataacctgaataccagggcatataacgctgataataatgaatcgacgtaattagcacgacggcccagataattgaaataaacttatagccatagcgcatcgcgccccacagcatgaccggcaataataacgaaagcgtatagttggtactaaatattgaactattatcagtcaatggcatacacagtataaacattagtgtagtcaatacggccagccaaataacgatctcttttttagtggccttgctatcaatctgtagctttaattgctgataatacccccgtaggtgcagcggattgcgaagagtacgaataataaaatagcacaatggcacgccgacaaggttaccgaccagtaacgcctggtaattaatcagcgtgttgatattaaagggcattacccccatcaggctggctttgctttcgtacatgccaacaaaagcggcaaactggtagatgaccagaaataatgttgctgaacaaaatacctgccagaatattcgttgaaacagcaggtgggcgtcgccgtgggaaacattgtttcgccggggggaaaagacacgatagccgccccagcttagcacgatagtaatgataaagtgcatcgtcacggaaagggtttcatacagccctgtctgcgggtatctgcgccagaagatagcaagcacaatgcccggcagtgctgcccagccgaaaaagagcatcaggctaagcataaaagctaacggcaggtaaaaaagaaccacatttccagtgctggtaagcgcataagtatttgcgctacttaaaacaggcagtaaaatcgaagggagaatgagcggtagtccccaccatttatctctgatatttatataagttttatttagtttcatagatgctcagcagaaccccccaatcccaaaggggcgttaacagacaggcatcccacctgactttaaattgatgatgagatatacatcacacgatagtcatcgattgtaattattaaacaaaagtaacatttgatttaagtcaattattacctttctcctgcagcctttattcgcctttttattctttgttatcattaatttattattaatgtaaatactaaaattatcttccataacaatataagataaatcaactgacgcaattttacattaagaggaattgaccatcggttcgcagtatgccttaatgtagagtgaacgcaggcttgttacgttcttcgccttgataatacccttgaagaacccagcctgatcccgcccatatcgctgggccaacgttaaggaaccctttgtgagtcaggccaacagtatgcgaaaacgacatcgatttaacactcgcatgacccgtatcgtactgcttatcagttttctcttcttctttggacgtttcgtctactcttctatcggcgcctggcagcaccatcaggataaaaaagaagcgcaacagtcatcgctttctgtcaccacgccgggacaacgttaagctgttatccgttaaaaagcccgcgcaagaaaaagaagctttagcgttaacgcaaaaagacaatcccactcaatgggttcaggccatgatcagacgcttaaagagcaaccgcgggatatcctgcctgggtgataagatcacatgcgcggttactaagattccctcgaccgaatacaaaacccgatagccttcagcgtggttaaactcccggtagctggcacagccaattttcagcagttcagggcaaccagttctacctacgaggggtaaacctcgtgggacaactccagtaacattaattgcttctaagtacatcagtaattggttgaactataaactgccacctgggatcagattaccaacgttgacaggcaaaactatcaactcattacagctaagctcaacgaataatttaggtcgtttcgttggtcgtaatgtaccctggctcggttgggttatgacattcactacgatttatgatatccagcgtaatattaaagatacatttaatcgtgtggcggttcctaaagatcgcattaagtggacgtacttctaatgagagatattgagaaagaaattatcgattttatcgatcaggaatataacactaaaaagtactttctctgtgggccaaagcgaatcatcacgcttgataccagtattagggatgatcttaaactcgtttttgaagatagtgaagaacttctacaaaagtacttcaagcgttggaatgtagattcagaaggatttgacatactcaactatctgaatccagagtactttggaagtaaagagcctgatccgcgtaagccactaacggttggtatgctcgttgaaagtgctaaagctgggcgttggttatatagttgaagaataaagttactatattttaaataccccttatttgggctgaatcgccacggataacctggacacttctgagtcgttggtagatctttttctttatccgttcacgcttcagtagctggaaaaagctttctgcaaccgcattgtcatgacagttgccacaacggctcatactgccctccagtccgtgcaatttcagccattcatagcgggtgtactgactaccctgatcagactgaaccagcacctgtttttggggatgacgtcgccacacggccatcagaagcgcattcagaacaatatcttttgtcattcgtggttgcattgaccaaccgataactttgcacgagaacaaatcaacgaccacggcaagatacaaccaaccttcgtgggttcgtaattacgtcaaatttgccgtcaggaactgtgcgccacatagaaaattcatgaatgcacataaataaaaaccctctgtaaaaacagagggttaaattcacctttacctgttcatgaaaacacaggaaggattatcggcttattcccactcaatggtagccggcggtttaccgctgatgtcatacaccacacgggaaatcccgttgacttcattgatgatgcggttggaaacgcgaccgaggaagtcatacggcaggtgcgcccagtgtgcggtcataaagtcgatggtttcgacggcacgcagagagacaacccagtcatacttacgaccatcgcccataacgccaacggaacgaaccggcaggaagacggtaaacgcctgactgactttgtcgtacagatccgctttgcgcagctcttcaatgaagatagcgtcagcacggcgcagcaggtcgcagtactctttcttcacttcacccagaacacgaacgccgaggcccggccccgggaacggatggcgatacagcatgtcatacggcaggcccagctccagaccaatcttacgcacttcgtctttgaacagctctttcagcggttcaaccagccccatcttcatctctttcggcaagccgccgacattgtggtgagatttgatgacgtgcgctttaccggttgcagacgccgcagattcgataacgtcagggtaaatggtgccttgcgccagccacttcacgtcttccagtttgagcgcttcttcgtcgaacacttctacaaaaacacgaccgatgatcttacgcttggcttccggatcgttctcgccagccagcgcggacaggaagcgctcttctgccggtacgtgaacgatattcaggccaaaatggtcgccaaacatgtccatcacctgctcggcttcgttgagacgcagcaggccgttgtcgacgaatacacaggtcagatttttaccgatcgcgcggtgcagcagcattgcggtgacggaagaatccacgccaccagagaggccgaggatcactttgtcgtcgcccacctgctcgcgaatgcgcgccacggcgtcgtcgatgatcttcgccggcgtccacaacgcttcacactggcagatatcgcgtacaaaacgctccagcatgcgcataccctggcgggtgtgagtcacttccgggtggaactgtacaccgtagaagcgtttttcttcgttggccataatggcgaacgggcagctctcggtgctggcgacggtcacgaagtcggacggaatcgccgtcactttatcgccgtggctcatccacacgtccagcagcggtttgccgtctgcggtcagggaatcttcaataccgcgaaccagcgcgctgtcggtcaacacttcgacctgcgcataaccaaattcacgctcattagaaccttctacatgaccgccaagctgcatcgccatggtctgcataccatagcaaacgccaaataccggcacgcctgcttcaaagacatactgcggcgcgcgcgggctgttttcttcggtggtgctttccgggccgccggaaagaataatgccgcttgggttgaagtcacgaatttgtgcttctgtcacatcccacgcccacagttcacagtaaacacccagctcacgcacgcggcgcgcaaccagttgagtgtactgagaaccgaagtccagaatgaggatgcgatgcttatgaatgttttccgtcattgacgcttattccgaggcaagtgaaacagattaaataaatcgcccgacacgaaggtcgggcgaagaaaatcaggagcccagacggtagttcggggactctttggtgatggtcacgtcgtgaacgtggctttcctgaatgcccgcaccgctgatacgcacaaactccgctttagtacgcagttcgtcgatggtagcacaaccggtcagccccatacaggagcgcaggccgcccatctgctggtgaatgatctctttcaggcgacctttataggctacgcgaccttcgataccttccggcaccagtttgtcagcggcgttgtcgctctggaagtaacggtcggaggaacctttggacatcgcacccagcgagcccatgccgcggtaagatttgtaagaacggccctggtagagttcgatttcgcccggggattcttccgtacccgccagcatggaacccaccattaccgcgcttgcacctgcggcaatcgctttggctatgtcgccggagaaacggataccgccgtcagcgataaccggaataccggtaccttccagcgcttcaactgcgtcagaaacagcggtgatctgcggaacgcccacgccagtcacgatacgagtggtacagatggaacccgggccaataccgactttcaccgcgctgcaaccggcttccgccagtgcgcgagcgcctgcgcctgtcgcgacgttgccgccgatgatttgcaggtcaggatatttagcacgggtttcacggatacgttgcaacacgccttctgaatgaccgtgagaggagtcgatcagcagtacgtcaacgcctgccgccaccagcgcgtcaacgcgctcttcgttgcccgcgcctgcgccgaccgccgcgccgacacgtaaacggccctgctcatctttgcaggagtttggtttacgttccgctttctggaaatcttttacggtaatcatgccaagcagatggaagttatcatcaacgaccagcgctttttctacgcgtttttcgtgcatttttgccagcacgacttcacgggcttcgccttcacgaacggtcaccagacgctctttcggcgtcatgtaaacgctaaccggctggttcaggtcagtcacaaaacgcacgtcacgaccggtgatgatacccaccagctcgttatcttcagtcaccaccggatagcccgcaaaaccgttacgctcggtcagggctttcacttcatgcaacgtggtggttggcaggacggtctgcgggtcggtcactacgccggactcgtgtttcttcacgcggcgaacttcttccgcctggcgctcaatggacatgtttttgtggataaaaccaatgccgccttcctgggccagggcaattgccaggcgcgcttccgtcacggtgtccatcgccgcagaaagcataggaatattcagacgaatagttttcgtcaactgcgtgctgagatcggcagtattcggcaaaacggtggagtgagcgggaacaaggaggacgtcgtcaaacgtcagggcttctttagcgatacgtagcatgggcaatatctcacctgggaggttaataaatattgccgcggcattatacagaacgtaatcggttgcatctacatttttttgcaaatagtgcttgcgatcccccgtgagcaggttactatcgattgaataacctgctgatttagaatttgatcccgctcacatgttatcctctcaaacttcctcaatttttaccgtaagccgccttaaccagacggttcgtctgctgttagaacaggagatgggacaggtatggatcagcggcgagatttctaatttcacgcagcctgcgtcgggccactggtactttacgctcaaagacgataccgctcaggtgcgctgtgcgatgttccgtaacagcaatcgccgggtgacgttccgcccgcagcacgggcagcaggtgctggtacgcgccaacattacgctgtacgagccgcgcggcgattatcaaatcatcgccgaaagtatgcagcccgcgggcgaaggcttgttgcagcagaaatatgagcagctaaaagccaaactgcaggccgaaggcttgttcgatcagcagcataaacagccgttgccctccccggcccactgcgttggggtgatcacttcgaaaaccggcgcggcgctgcacgatattctccacgtgctaaagcgtcgtgacccatccctgcccgttattatctatccaaccgcagtccagggcgacgacgcgccggggcagatcgttcgtgctatcgaactggcgaacgcgcgcggcgaatgtgatgtactgatcgtcgggcgcggcggcggttcgctggaagatttgtggagttttaacgacgaacgcgtggcgcgggcgatttttgccagccgcattccggtggtcagcgccgtcggtcacgaaacggacgtcacgatagctgattttgtcgccgacctgcgcgcgcctacgccatcagcagcggcagaaattgtcagccgtaaccagcaggagttgttgcgtcagatccagtccgcccagcagcgtctgggcatggcgatggactactacctcgccaatcgcagccgccgtttcacgcagatttttcaccgtctgcaacagcaacatccgcaactgcgtctggcccgtcagcaaaccgcgctggaacgtctacgccaacggatgggatttgcgcttgaggccaggattaagcaggccaatcaacgccaacagtgcgtaagtcaacgcctgagccagcaaaatccgcagccgcgcattcaccgcgcgcagtcgcgcatccaacagcttgaatatcgtctgacggagaatatccgctcacggttaagcgaacagcgcgagcgttttggcaacgcggtcacgcatctggaagcggtcagcccgttagccacgctggcgcgcggctatacggtttcgacgacaacggacggcaaggtgctgaaaaagatcaaacaggtcaaagcaggcgatatcatgaccacgagactggaggacggctggcttgaaagtgaagtcaaatccgtcacgccgggcacgtaatccaacactcccccaccctttgcagcgcgatgttgggtttcgacttcgcctcagccaacctacgcgccacgtcggataaggtgtagccataatctgacgatcaaccggtttgtcattcgcctcaaaaccgggcagggaacacccgcccggttttgtctaacttaccagttatagcgcagattgaggctaccgttcagatcgccaaagtcattgctgccagtctgcccggcaacctgagcgcgaacgctccactgcttatcgatatctgcctgcagacccactttcagctccgcacggttagccggaagatcctgtttcaccgtagcatcatcaaacgataccgacacatcatcgctggtgtgcagccagttagcttcagcaaacggctggataaccgtacggctgcctttgtacagcttgccgtcaacacgcagacccagacgcgttgtccaactgtcgccatcctgaccatcgatccgggtgccgtagttatccttcacgctatccgctgagtaattctgccagacaacctgcgcctgcggcgtcagactgacagtattaccgttgctaagcgcaatatcgtagcgataaccagtttccagcgagacggcgttagcggttgaatcataagattcagatcccgcatcaccgctctctacgctgttgttgtagaaaccatattggtaccagctgtcgacatacgcgccgctatgcgtttgggcatcggcaaaccaggtggcatagacgccaaggttgtagccgtctacgttgccgctactggtgaactggctaccgtctgcgccacggttaccggtgctgtcggtatcggcgttgatgtagctcgccatgacgccaacggtaacgctctgctggccgttaccccaggccagaatgtcgccgcctaactggaactgggagtagttgctgtccatatcgatattgccgctgacagcctcggattccgctttacccgctttgaagcgcgcccatacgctgccatcggcattacgatactggctgccctcgcggtcatagagggtctgcatttgcaggttgcgcgccatccactggttgcccatgtacgcgccgatatccgcacggtactgcggtgcgacatcgccgccgtggtccggaggcgtgacatcgccgccgtcgccgccgtcgtccggaggcgtgacattaccgccatcgccgccgtcgtccggaggcgtgacattaccgccatcgtcaccgccatccgaaggcgtgtcatcaccgccgctgtcgtcatcatcagactgtgcttttgacgccagataccagtcgttgtcactttcattccagtacagacggtaggtatacagaccggcgttaacctcattttttagctcaaacgcatcgctggtcgatacgccgccaacatccaccacttcgataccgttagtggtctgtgctccatcgccgatgccgttgatgtacagatcggtggtgccggaagcatcgccggtaatgaccaacttatcggttgccgaatcatcgtcgcccaggacggtattcaggtaaagcgagccgccgttgccggtgtaattgccatcgacataaagcgtattgccaggcgtgctggagctgctaccactggtcattgtccccatgttgatcagatcgccattgagggtgaagatagcgcctgtttcctcgctgttgccgaagaccagcgtcccttcgttggtcaccttaccgttaacggtcgtaccattgctgccgccgaaggtcgccccggaggcgacgttcaccgcctgctggctgcccatctcgccaatcgagccgtctccggacagccatagcgtgccttcctgtacgttggtatcgccgctataggtgttcgcgccgctcagcgtcagtttacccgcgcccagtttggtcagcgatttaccgtcccagtcgccgttgccggttttatcgcccagtacgctggtgacttcaaaactgtcgcctgcgcccagggtaaacgtgccgtgtgctggcgtcgctgacgtggcggtcgcattccagctcagcccttcggtaagcagatattctgacgcatcttcaggattgattgtcccggttacggtcagatagtccggcttgtcagtgaggttcatcgtcaggctggtaaagtcgccgctgatatcgctggtcatatccatcagtttaaaggactggaactccgcgtcggaggcgcgcgcttgcaggctggcgtcgctgacgaccaaatcgccgccaagcgtggcgctgctgccggtaatcagcggttgcactgagtcactattcagctcaacgttcagcgtactgccatcttgctgaattaacgcgctgtcgccgagatccaacgaggtgccgagcgccagttgggtcgtcgcgccgctatgagtggtgatgccgcccaccgcgctgacttcaccgtctgcgtccagcaccagcgtggcattattgtctaccagaccggtgcccagcgccgtcgtactggcggcgaccagcgtaccttcattgatggtggtgccgccgctgtagtcgttgtcgccagagaggatcagcgtgcctgcgccttctttggtcagcgatttaccgtcccatctgctacccggatccagcgtatcgtcaacgtctgtcagtgtagccgcaacgttaaagctgccgtcagggtcgctcagggtaaaggtgccgtgggcgtcggtagtggcgttgtctctgtccgcataccaggagagggaggccgtcagatcatagtgggtgttgtctgcttcatcgacttttccgtcgatagtcaggaagtcaacatcttctctattcattcccgcgacggtcagatcgtcgaaatcggtcgtaatggcgctgtcgctgccaatcagcgtgtaggtgtatgcctcaggcgtccagctgtctgtaacgctgccaatgccggtaacattcagcgtgccgcccagcgcgacgctgtcggcggtaatcacggcgtcgtcggtggccgcgccgaggtcaatacttagcgtactgccgtcttcctgggtgaactggcccgcgtcaagggtgctgcccgctgccagcgcggtagtggcgccgctatgggtggtgacgttcgcaagctcaaatgcgccgttggcatccagtatcagcgtaccgctgttgtcgatattgccgctgcccagcgcgttgacgttggcggcaatcagcgtgccgtcagtgatagtggtggcgccggaatagctgttgtcgccgcctaacgtcagctcgccggtaccggttttgaccagcgaaccgctgccggaaagcgtattttccagctcgccctcaccgacctgaagcacaccgctgttggcaacagctccggtacccagcgaatccgcatggtcagccgtcagcgtaccgccgataatggtggtgccgccggagtaactgttatcgccgcttaacgtcagttcgcccgtaccggttttgaccagcgaaccgctgccggaaagcgtattttccagctcgccctcgccgacctgaagcacaccgctgttggcaacagctccggtacccagcgaatccgcatggtcagccgtcagcgtaccgccgataatggtggtgccgccggagtaactgttatcgccgcttaacgtcagttcgcccgtaccggttttgaccagcgaaccgctgccggaaagcgtattttccagctcgccctcgccgacctgaagcacgccgctgttggcaacagctccggtacccagcgaatccgcatggtcagccgtcagcgtaccgccgataatggtggtgccgccggagtaatcgttgccgccgcttaacgtcagctcgccggtaccggttttcaccagcgaaccgctgccggaaagcgtattttccagatcgccttcgcccaccttaagcacgccgctgttatcgatatcgccgctgcccagcgaatccgcatggtcagccgtcagcgtaccgccggtaatggtggtgccgccggagtaagtgttgtcgccgcttagcgtcagctcgcctgtgccggttttcaccagcgagccgctgccggaaaggatgttttccagctcgccttcgcccaccttaagcacgccgctgttgtcgatatcgccgctgcccagcgaatccgcatggtcagccgtcagcgtaccgccggaaatagtggtgccgccgctgtagttgttatcgccggtcacgatcagctcatcgctaccgcttttgacaatttggccctcgccggtcacgttgttatccagcgtgccctggctcagcgcaagcgttgcgctttctgcaatcgtcacatcgccagtgccgagcgcggcggcgtctttggcggccagaatgccgccgtcaatttcagtatcgccgtagtcgttgccggtgttgctgaggatcagcgtgccgtcgccttgtttggttagcttgctgccgttccagttggaggtcgccgtggtttcgtccagttcgctggtgacggtaaaggtactgcctgcatcaacggtaaaagtgccatgcgcagcgcgcgcagaatttgcgcccgcgtaccaactcaagcccgtagacaactcgtagttggtattatcattcgcatcaacgcccgcgttgatcgtcagataatccggcatagcggaggtgtcagcatccagtgttacgctgtcaaaatcggtagtgattgcagtttgcgaatcaatcagcgtgatcgatccaaagtgttcgtcggtttcgggcgcgacaaaggtggccgttgagctaaggttcagcgtcccgtccagcgtgacgttggcggctttgataattggcgcgctgttggcggtatccagcgtcgcgtttatctggctgccgtcctgcaaggtcagggtattgtccaccgtcagcagcgtacctgtcgaaccgctcgcgttgcccagcgtaatatcgccgtcgttggtcagattgccgacggttgacgggtcggtcatgttccactggctggtgtcgtcgagcgacagcgtagtaaacatcgcatctacactaccggttaacgtggacccctggcttaaagagagcgatgacgatgacgcgtcagtctggacaatgttgccggtcagcatcgttttttcggcctgaatagtcgctttgctgcctaatttgatcgcggtcggcgccgtaaaggtgctgttggtgagctcaatggggtcgttaatggtcgtgctgccatcaatgttcagtgcgacagtttttgaggtgacgtttgcgtcgctgaccgtcagcgcgttgagatcctcatacccgtcgagttttcttttgctggttataaagataccgtcgccgtcggcgttgatggtggcgccgtcgatcctggcgtccgacgccagaatatacacgcccgtaccggcagaggtaatgttgccgcctgtaatatccagggtagtggcgttattggcctgtaccgccgcgccgctggcattggtatgtgttatggtcgcgttggtgagattaagagcggccttattggtaccctggatggtgctcatcgtacctgcagagctgaccgagctatcagacaggttcagggtggaaccctcgtctgtcgcggtgtttccggcaacaacgtttatctggccttgcgccagggtgattgtgctaccgtccagcacgttcagcgtactgccttgttgcacctgcgcgctgctgctgttagctgcctcaacgatggtaccgtccagcgttgcttctgaacccgtatacaacgtcattacgccgaaattgccgtcaatcgttagcgtactgtctgttaacctcagtgtgctgccatccgctgcggaaataccctgggtataaatacccgtagtggttatcttcgcgtcggtaagctcaaggatagcgtaatgatccagcgaaatggcgttggaaacatacttaccgccatccggatcatcagccccgcctccgcttgtttcaatgacgagccccgtccctgtgaccgtggtgggctgccagccgacggtggcgacacccgagacatatagcgccgcgccttcatcggtgcccgaatagcttatcggcggcgttgacgcatccagaacgtggggctgcgcatcagcatatgatacctgattatcggccatagccagcgggctgaaaaatccgagcgccgcagccacggcgcaagccagcgccgcgcgcgttgcttttattatttgtccatattcggacttttggtttggagaatgggtttcactcgcgcatacttgcgctttaactttgctgtggcctcacgccagttctgaagccacgacatacatatttcgcacggcgctccagacaatactgtaagtcctgttcaatttttaaatttccctttaataacgttcacgaagcaaactggattttgattgggctgcaaatagcctttaaatgctacattatcaatgagttaaataataaataacaaaaatacagctctatgaatggttgcaatcacctgaaacaatatattatccaagccaaattattaactaatttcaaggcttatttcaatgccaggtcaatttctggttgatttataattgatataaatacattcatccatttaataaatatttatatcgtgaataacatttaataacttcatatattgaaataaataaatgcgtgaaacaaaaaggtgtgattatcatgcgacacctggcgttattttaaatatactcgtcatacttcaagttgcatgtgctgcggctgcgttccctcaccccagtcacttactttagtaagctcccggggattcgctcgcttgccgccttcctgcaactcgaattatttagagtatatacgtagcgccagatgccgggttgcagaagggagacggcgcttttacacacgcgtggcaaacggtggtgacgccaattagcagaacatatacttttcaatgaatgctactttcactttttcatgaagctcaattgaacgtgaaaagcagattattttcgtgccagacgcataatacgttactccacgcacgtcgcataacccgctgagcctgccggcttaatggcgcagttttgactcttggtattctcatctacgccgcaatacatgccgccgcttgaggttgatttagataaatagggatagccctgcgtcggccagcctaacgagctaattgaatgatacagcgtcaacaggtcgttattatccggtgctttgctaaggctaccgcactgtttggcaatatcccatttcgtgttgtccaccgtatgcgccatcgcccagtactcgttatttgcatgcactccgttggtaaatactggcgttacgcctgacagcatctcagcctgaagccacggacgatgcagcgtttttccgttgacggatgtcgtatccgacatatttccccagaacaacgctttatccgtatccgggctggtaagtaccataaaaatcacatccagcgatgcgtgaagagtcgtattgtccgtcactttcaccgtgagtggcgttttcaaccccaggcttttatcctgattaagcgtaaacgttgccgtaccgtcgctgccggtagtgccggtaaagacaatcccggtggtggtcatactttggctggcgcttgcgggagtcagctctttaagcatgagatcgtctgctccggcatccgctgccacgtcgccatccgttatcaccatacctgcccgatttttcgaatcgccacgtgacaacgtaaaaccgacgttggcgaccgggttaccgctgctatcttttaccgtcaccgttaacggcatcgcgcttcccttcgccactaccgccgcatttttcgcgctgtccatcgccgtcgaggtcagcgtaatactggcaggagtagaagtacgcggctcgaccagacacacctgagcgccggtggcagtcgatgaactggcggtgcccttaccgccgctattcaggtttataaattggtaatatccggtattcggcgcacgatccgccgcccaccaggatttgttccccgccaccggccagccgtaatttgtaccgattgcgccgttaggattgtcgctatacaacgtttgcagatcgcccgacaacggctggtattccgcatcacagccggttgcgcccgctttttcagtgttcgctgcggtgactaagggccatgtttcattgttaaccaggtaagtaccgctattcgacgtcatctccgccgccagcagcggacgccggaacttcacgcccgcgctgttggttacggtttccggcatgtgtccccagtatttagctttatcactgtccgggctggtaatgacggtgaaaatgacgtccatatcgctaactgtcagcggatcgtcgacaagcatcgcctgtagcggtgttctcaggccacgggaatcatcctgcgtcacttcgagttgcgctttaccatcctcatccgtaatgccataccaataacttgtgcacgaagataccgtgcagttaaacgtcattgagcccgtagacggcgcaaccgatgtgagtacctgcctccgccggaactgccatcaacgacacccgcccggtctatcgaaagcgttcgtcccaaacggatagcggtattgggctgcggcgtgccggaaccatccctcacagtgacggtcaacggcaggctctcgcccttcttcgccactggagcgcctttatccgcatccatgtcgctggaggtgagttctatcgacaagtcccggcgctttgccagacaaagctgcgccgtggcggtattggctttggttgtcagcgtattattatcgctgagtctgacatactgaaactgactgtctgagtgcgtggcatccggtactgagttacccgccccccaatattttcctgatgccaccggtaggccaagcgttgtcgtgagtgcgccattgggataatcggtatatagcgtctgtaaatcatttaccgtcggcaaccccagccgatcgcacgggctggcggtgtcctgatacatattcggataacggctccaggtataccaggtctcgttattttccgtataacccgacgtgtccgccgttgaagaaagttcagcgcgcagcagcggtcgcttaaattcaacccccttactgttggtaaaggtttccggcatatggccccagtatttggccttatcgctgtccgggctggtcactacggtaaagattgcgtctttgctgtctgtcaggttgctgccgtccatcgtggcggcgctgatagtggtttttaaaccggcggtactgtcctgcgcaagggtaaatgtcacctgtccctgggcatcagtttgcgcatacagatatttcgccgaggtatccagcaggtatgtcgccaggccggacggcatcacattacgcagcgtaatatcgtctgtgatgcttgaggacgatgtggcgctgttggcgcgattgtacgaagatccgcggctgattttcaccatcacgtttttcatcggctgacctgcggcgtctttcacgtcgatggtggcggccatctgctcgcccttcttcgcctttgcgcttccggtggtttcatcctggcctgccagcgtcagcgtcaggctggcggcggcgctgcgcggcgaggcaagacaggtctgcatgtagtacatcgaggtgctggtcgtcgttttgacatcattgccgtcgttaaacaggttgaccgccgcatagagcgacttcgtgccgtctgacgatatcacgtaatcccccgcccaccagtagcggctgacgttgttgttgcctgaactggtcatcggccagccgttacggctgcgcatggcgttatccgggtatgtcccgtacagtgtctggaggttggctacggtcggtagcgtgtcgcgcccacagccgccaccggtgccgttccaggctttatcgacggttatcatgccccaggtttcgcctttgtcgtagtagccgttggcgatggtcagcgttttgccgggcgtagcgctaaactcgctggccagcagcggacgcctgtacgccacgccgctgctgtcggtcagcgtttccgccatatggccccagtagttggccttcggcgtgtccggactggtgaccacggtaaagatgaccggcagcggcgcgctcgttacgccgttgtgttctatcgccgccgtcagcggcgttttaaagcccgcgccgctgtcctggctgatattcagcgtcagtgtgccgtcggcgcccgtggcggtgtaatagttagcgccgctgctacgcccgtcgctgtggtttatctgtatatccgccgccgccgagctattcacctcctgattcgcgcgcccgacgctgtcgccgcgcgtaaagataaccggcgtgtcggcggccgggttgccctgggcatcccgcgtggtgatgatgaccgggatggtctcgccgactttcgctttggcgaatccgtcgctgtcgttatacacaggcgaagtgagcgttatctgcgtcgccgccggatgggcgttttgcaggcagacaaaatagagttgttcattccacaatagcgaaccgacgccgccgtcgcgcagattaatcgacttaacgtagcggttttgcgtactccggctcaaatcggcggtgctgtcctggtagtttttaccgtccagcggccagccctgctgcgtattcatggcgccgccgggcctggcgtcgtacagcgattgcatatcggcaagggtcggcacgtatcccgcgccgcaggcgtcgttcgccatttcaaaatcgacgattccccacgcttcgttgttttccgtattgtcgccgtgggtaacgccgctggcgatttcagccgataacagcgggcgcttaaacacctcgccgttggccgccgtcgtcgtttccggcatatggccccacattttggctttgtcgctgtccgggctggtgaccacggtgaaaatagtgtcgatgctggccgtcgcgctggcgttgtcgtacagcgccgccgtaatcgcgactttcgtcccgtgggtgtccgggcgggtgacgttgatgattttgctgccgttttcaccggtcatgccgccgattttggtggcggtgtcgttgagcgaatcgccgtcgatcaccaccgccgagacgatgccgtcgccgctaccggcgatatgtttctccccctggcgggtatagccgtcgccgcggcttaacacgaacggcgcttgcggcagcggattgccgctggcgtcttttaccgtcactttaagctggagcgtatcgccctttttcaccttcaccgcgtgttcgctgtttgcgttataccacaatgccgcatccaccggctcaatggtgatagacgccgccgtcggatttttgctgaccagacagctcacgtagtccgacgcatcgccggaagcggtatagccgcccgcagccagtgataccgcctgccatgtagcggcgctggcgaaggtggatgaccagtagtcatactcagtcggccagccggatacggtgtggattttattgccgtcgctggaggcatacagtgcggcaagctgatcggcgcgcggcagatggccggcctcgcagcccccggcgttggggttattcagcgcgtcggcgtggctgacacgcgcccaggtttcgttatcctgctcctgggtacgggtggcggcagtcgcttccgccgccagctttggccgctggaatttcatatcacccacggtgagcgtgtccgccatatgaccccacatctgcgcctccggcgtatcggggctggtggcaacggtaaatttcacgctgcggttgacgggcgtggtaatcagtgagttgaccggcagtacgctcagcggcgtcagcaagcccacgccctgcggctgttcaatcaccagcgtggcgttgccctcggcatcggtcatgccctggtacgtcatcgacgcctgggaagagccgaaaggcgttccgcccatcaccagcgttccgtcgctgggatcggtaaagcccgtggtggcgttgtcgcgatttttgccgtgcgacatggtgacggtaaagctggcgttaggcacgcttaacccattcagcgcattgacggaatggacgttcatcgtgatttgttcgccgactttggctaccgcattgcgtaacgactcatcgccattaaagtaaacgtccagactggtcaccaactcattgccggagcaggagagatagttcggttcggtgccgctgaacgtgctgtccgcaccggtcgccaggttgacgtgcgcggtggtggaaccatcagtatccgccgcgatatagctgtgtttctgcgtcggccagccgtaggtcgtttccatcgcgttgccggaatgggcctgatacagcgtatccagcaacagttgccccggcacctggccggtaccgcactggttcgtcgccgccgttaccgagttaaacgtcgcccagtattcgttattctcaaattcggaaccggtatcctgcgcggcttcgtccgccagcagcgggcgtttgtagatattgcccgcttccaccacgccctgcatatggccccacatgcgcgcctgcgccacgtccgggctggtgacgacggtaaaaatcacgttctgcgtcgcttccgtgccgtcgaacagcaccacgcgcaccggggttaatacgcccgcccccttgtcctgagtcaacaccagcgagaactgaccgttggcgtcggtgacgccgtgatagtgaccgtcgctgccttccagattggtgataattaccggatcatccgtccactgatgcccgctatcaatatcggcgttcttttgattctggcgattttgctcgtcgcccaggtagacgttaaagtagcgataaggcagcggtttattggtggcgctgtcggtgacggtgatcttcatgttgatctcttcgcccaccttcactttcgccgcgttgaccgttgaatcaaaattatcggcgctaatcactaatttcggcgtgaccgcaggcggggctttatccacgcagctaaccagcgattgcgtggcgtccggcatctgcgtaagggcgcggctgcgcatatcaatgctgatatggtcagtggcagtcgatccctgggaggaggaccagtactcttcgtcaccggatgtcagccctaccggccagccgagggtggtggccagatcgccgcgcgcaatttttaacccttccagttggcgtgcatccggcagaatatcgcagtgcgcgtcggcgtggccccagttgaactgcgcccaggtttcattgttgatgctggcggtgcggtcttcactgtcggtttccgccgccagtttggggcggtaaaaggtgtagcttgcgccgtccaccgtggcggtggacgtctctgccatatgaccgtacatgttggcgctgctgctgtccgggctggtgagggtggtaaaaatcacgtccacgctggctttcagcgctggcgcgctcgacgggtgcgctatcagcggcgttttaacgcccgggccgttcgcctgggtgacgaccacggtcgccacgccctcggcgttggtcgtaccgtgatattccgtggcggtggtggtcagttcggtgttgccgacgcgcaccggcgcggcattgtttaccacgccctggcggttttgcgcgtcgccgcgggtaatcacgaaatcaacgttgccctccggttcgccgccgcagtctttggtcgttaccgtcagcatgatgctttcgcccgctttgaccttcgcggcgttgagcgactcatccagatgatcggcggcgagcgttaccgggtcgcccacggcgggcgcgatatccacggcaaacttttgatcaagcacttcgaccgccgtgttataaggcacgccggtgcgggtaagcaaccacagcggcggtatggcggttgaggtatccagttgcgaccagaccaccagatggcggcccgccagattctgcgcgcagaaacttatattgctgacgggttgtggatcaagcggcgtgtccggcgtggcggcgtcggcccacaccagcgtaacggcgggcgcgcgttcagcctgccaggccagcggcggcacggcgaagatatcgccttcggtgtcgtgcggattggttaaggtcagcgcgctgccgacatcactggtgctgaactggctgggcttcgcggagtagtcaacaggattcgccgcatcagagcgcaactgcacgctgccctgatataccgggatcgttacactgtcggcctgaggcggagtgccattaatagccgcagtttgctcagtgagttcctgccatgcgccgctgcttcgcacggcctgcgcgaagaaaggcgttaaactgagggcgcatagcagcagccagggtaaaaaaccgacacactttttcgatttcactgacgtacctgagaaaagtccatttcgttgcagttcattccatgaatacaaaaacgtaaaaatacatcgctaccggaacagcgccagctacaagggatacccaggttgggcgccgcaaagcgtcacccaacattcaaacgcgctcccggccccattccccattcactacggcacccggcacgagcctaagcccgaggtcgtcgctttttcacgagtacaggttgtctggccggtcgtttcgttaaatgaacagtagtacttattgctttgaccttcatcttgcgacacatagtcccaggatgatgtcgtcggccattgcaacgtgccgataacgctctgcaacgctttcagatcgtccagcgaggctatattttcctgcgatccgcaaagatgcgtcaacgacgtttccacgtgttcggactgataataatagttcgtcccccagaattcattattaaacggccaggtatcccggggcgcggcagagagctcggctttcaggtacgggcggcgcagcgtaacgccgttcacctgcacggtatccggcatatgaccccagtatgacgcatacggcgtatccgggctggtttgtaccgtaaagattgcatctacgctcgccgcctcatcaaattgattcgcaaacgccgccgtgacagacgtttttaaccccagcgatttatcctgagttaacgtaaaccgcaacttaccgtcatcgccggtgaagccagaccattttgtgctgaggccattctggttattaaacgccactgccgtacccgcaggtgcaaccggcgccagcatcatattcgccggcgaagttgtaaacggaaccggctcgccaatcacgcctggttcaatgtattgcttatccaccgcaccgcgcgaataagcgtaatcacgcgtcaacagtacggccaccccggcctgcggctgcccggcgtcgttagtcaccgttaccgtcatcggtatcgtttcgccttttttcgccacggccgccgatttatcggcgttccatgcgtcggaagagagcgcgatattcagcccgctgcgcgatgttgtcaggcagagttgtaagtagtagttacccgggttttccgacatgctgtagtttttccccgtcttgagatctttatactgccagtaaagggttgagcctttcagcaggctatcccccgcccaccaccgcttcccgacgggcaatccaatatcggtcgccaccttgccgcttgggtgatcgttgtacagcgcagtgaaatcatctatcgcagccatctggttcatcggacatccgccgtaattaccggtattaaaactattcaccatgatccagttttcattggtttcgaaataggtatccgtgtgcgcctccgatgagggctcgcctgccaccagcgggcgcttaaactccgcaccgttgctggcggtgaaggtctccggcatatggccgtacatgttggccttgtcgctgtccgggctggtgaggacggtgaacaccaccggcagcgatgaggtcgccgtcggcgtatcgttcagattcgcggtcagctggtttttcaaccctatgccgccgggttcggcaagcgtcagggccagcgtaccatccgcgccggtggcgccggtcagaaccgatgtggcatagtaaaactgttgctgcgcaccggtgagcggcgtcaccgtcatgttggtgccgttagtggctacaaatttattatagtcagggttgcgcgccttcccggcgtcacgtttaagcgaaaaagtcgcataaggcaccgggttgcccatcgcatcggtagtggtgatgagtagcgggatcgactcgctgtttttcgccttcaccgcctgaatagcgtcatccatcgcctgcggggaggtgagggtaatctgcgtggcctgcggcagcggcgtcgtggcgcaaatttgatactgccaggcagtgctggtcgcgctgttttctgaccgacgcgaaccatcagccagatcgactgcgtaatagaagtcaagttttgccccgctggaaaatgacgtcgagttcgatccgctccagtaagaatagtagaccggccagccctgggcggtatttatcgttcggctcgggtatttgctgtagagcgaatccagcgcctcaacggcagggtaatagcccgccgcgcaacgggccggattggccccttcactggctggcccatgaaaaaccgcccaggtttcgttggtttcttgcttagacgcagtattgtccgtactggacagctcagcgtacagcagcgggcgctggtacaccgcgccatccgccgccgtcagcgatggcgccatatgcccccacatgcgggcaacgctgacatccgggctggtgacgacggtaaagatagtgtcgatgctggcactcacggcggcattttcatacagcgtcgcgttaatcgcggtgcgggtgccgtgggtgtccgggcgggtgacgctgatgatacgggtgccgtcagtgccggtctgcgaccccattttggtggtggtccatgccagcgattcgccgtcgatcaccacgggcgtcacgatgccttgcagatcgtcaccgtcctgagcggtatacttttcgccccggcgatcgtaaccgtcgccgcgggtgagcacaaacggcgcttccgggatcgggttgccgctgacgtccttcaccgtcaccttgagctgcatcgtctcgccctttttcactttgaccgcgtggacgtcgctgccgtcgtaccactgcgacggattgaccggttcaatggtgatggacgccgccaccgggttatcgctggccaggcagctggcgtaaatcgagacgttgctgttggcaaattcactgccgttcgtcagcgcgatcagtttccaggtggtggcgctctggtaggtggacgaccagtagttaagataggtcggccagccctgaatgctgtgaatcttgccgccgctgttggcgttatacagcgcctcaagctggtcgatgcgcggcaggcggttcgccgcgcagccgcccgcatccgggttgcccaccgcgtcgctatgggccacgcgcgcccaggtctcattgctctcgtcctgggtacgcagcgggttgctcacttcacccgccagtttgggccgctcaaaggtccagtcgcccacggtaatcgtgtcggccatatggccccacattttggccgctggcgtatccgggctggtggcgacggtaaacttcacgctgcgggaaaccggcgtgctgattaatgaatcgacgggcgcaatatttaacggcgtcagcagccccacgccctttttctgggtgaggataatggtcgcatcgccgttagcgtcggtgatcccgtgataaacctgcccggcaacgtagcccacgtcgtcaaactgcatctcgccgttgctggtatcggtaaagccggtcgtcagcccgtcacgccgcctgccgttcgccatggtgatggtgaagtcggtattgccgatcgccatgccgttaagggcgttgcgcgaatggatgttcatcttaacctgttcacccactttggcgtcggcgtttttgatcaccgggtcgtcgttgaagtagacgtccagcaccgccaccatttcattggccgagcaggtcaggtagttgggcgtatcggtaaatttgccgctatcgccgttttcgaggttgacgtgtaccgtcccggaggcgtcgctgtcggcggcgatgaaataatcttcagtcggccagccgtgctcgctttccatctgtccgcccgcatgttcgctgtacaaatgcgccagcgacgactgatccggcacctggccgacaccgcactgcgcggtggccgacgccacggagttaaacgtcgcccactcttcgttattttcgctgaattggccgtctttatggctggcctccaccgccagcagcggacgtttgtacaggttgcccgcgtccaccacgccgcgcatatggccccacatgttggcgccgtccacgtccgggctggtgaccacggtgaaaattacgctaaaggacagctcgacgttgccgccttcgtcgtccggcatcacgatgcggatgggcgtttcgacgcccaggccgctgttatgttttaacgtcaggtgcgcctggccgttgacgtcagtcacgccggtatagtgctccggcgacgaggcgctcataccttcggaatcaacggtgacccgcaggttatcccatgcgtcctgatgttcccctttgcggtttttcgccgggtcgataaacagctccatgtagcggtaaggcagcggtttttgcgtgtcccggtcaactacggtcatcgtcagatcaatcgactcccccacctgcgctttatacggtccttgtggggagagagtaatctgcgggtgcgccgcaggctgggctttatccacacaactgaccagcagcgtgtcgctgtcggcggccctgacgaccgatgcgctgttcatatgtacggcagcgtggtagccgctcagttggtttttggtcgatgaccaatattcagcatcgcccgccaccggccagccggtccaggtttccagcgtgctgtgctcatgtcgcatctgcaccagctgttcggcgtccggcagaatgtcacagtggttatccgcgccgctccaggtaaacagcgcccaggtttcgttggtatcgacgacgcttttgtcagcgccgctcgcttccgccgccagcttcgggcgggtgaaggtgtaggttataccgttcagcgtcgcggtagcgctctctatcatgtggccgtacatactggccttatcgctgtccgggctggtgatggtggtgaaaatgacggcggtttcagccgtaagcgccggaaagttgaccgagctgacaaccagcggcgttttgacgccggggccttccttctgggtgaccaccaccgtggcgttgccgttggcgtcagtgacgccgcgatattccgtttgggtggtcgtgagctcggtatcgccaacgcgaaccgggttggcgttattgaccacaccctggcggttttccgcatctttacggcggatgacaaacggcgcgttgccttcgggcgtgccgtcgcacgctttggtggagatggtgagggtgatgctttcccccaccttcacttttgatgcctcaaaggccgaatcaacgtgatcgccgctgactgtaaccggcgtgtcggtggccggtttaatgttgagcgccactttcgggcttaacagcggaatggtcgcataattcggcaccccggtacgcgtaaagagccacagcgcgggaacgttggtttcatcttccacctgcgcccaggccaccagctgtcgcccggcgaggttttgggcgcaaaaggtcaggttcggaaccggctgcggcgagagcggcgtgtcgggcgtggcggcatcggcccataccaggcccatggcgggcggctggcggttttcccaggcgatggtgggcggatcgctaaagagatcgccttcggtatcggtggaattgaccgcccgcatcgaggttgaggtagcatccgcgctaaaatcgcgcggcatggcgctgaattcaatatcgtgggttttgctcgggtcaagcagcgtacttccctggtaaagggggataatagcgccgtcggccagcggcgcggtgccgttaaccgcaccggtgactgagttcagctcttgccaggttccgcccttcaatagcgcctgcgcaggtgcgatcgacactgcaaacatgatcagtaatgtcagtaagaaatgtacaactttattcacttgccgattcctgtccatgagcgatagccacccgttttcattctctgtcgtaattcaacccactttgcttagcgcgcggctaagcaaagtgcgcggaaaataccactccccgcggggagtggtatgttgaggacaacttatttgcgtttgtagtcgatggacagaccaaagccctggacaccgtcgctacccacggtaacgccgccgtctgctccctcgaacgccgttttcgcttcggcgttggtgacagggatgacaaggtctttatcgttccagctttcgttgacgataccgccggtaccggtacctgcaattttactggtgccgacgaatttccagcggtagtcatactggtcggtaacgttttcaccggcatcataggtaccgttgccgttcttatcgctccacagcaatacctgataggtggtattcgttttgagtgtcgtccctgaattcttcaacaggttggtattcgaatctttctcatgaataaccacatggacgttttcatccaccaccggaccttccggaatttcgtcatcatccgaaccaccgcccgcatcggtcgacaggtctttcaacagcagttcggttgccacggcagggtcaccggtggtagtggttggcgtgattttgataccgatataacgatccgcatcagcggcctggatttcataactgtcaccagtaccaagatctttggggtcgctgccattctgatcgctaaagctcacccatttcacggtggctttagttgccgtgttgtcggtgtccaggtcgccttccgtatcgccaatcgcccagttcaccgtgaccttatcgccaacgtggaactgcttatcgccttcggtcacaattttacgatcgccgcgatcgatagttaccgttacgtgatctttgtcggtatccgcagttttatccgccgcacgggtaatccacggcaccgtaccctgaatggtgcccgtctgttcagagacaatctgccactgccccgatttcagattaccgtttgccgccaccgctggcgcggcgcaatacccggcaactactaatgctaaagcgaccttcgtcagccgccgttttactgttgcttgcattcagactctcctttttctcaaaattcagcggctggctggtcagccacaacgctgacgctatttctgactatacgtaacgcgtatgccgtaaccctgaacgccatcttccacattggcggcaaacttctgcgccgcctctttattggttactggcaggacaagatcttcattcatggtgttggccagcgcgccggtatgtccgtttgtactctgcccggtaaactcccactggtagtcgtacagcgccatctcttcttccgtgagctgctcggacatctggaatacgccgtctttatttttgtcgcgccacagcaggaaacggtaagcattattgaccgtagggtgcttatcttctttgccgataaggttgacagggttggcggctttgacctgataaatcaccgcattcagcgcgctcaggttgtcgccgataaaagtgacatcaacgtagttactgtcgccataggcgtctgctttcgccttccagcggaaagtccccggcagggtgctggaaagcgtcaccgtccccgcttctttgtcacgactggcaataaacacgcagggggtttccgtggtgcagggcgtctgggccagggtgacttttttatcattgctgtcgtacaacacgggcgtcatggcatcgtccaccagttcgttaccattgcgatccgtggagtcgccaaaggaatcggtgatcagcagatccatcaccacgccgtcttcgccatcggccagcgcgctggcttcatggctgtgatcgctgcgatcggtatcggcaatgttgtcgacgatcagctcaattttgcgatcctgctggacggtgatttccaccacgccggagttctgcttattgcccttttcatcttccagcgtcatgcgtactttccaggtgttcagggcggtgcgctgctcttcggtatcggcattaacccaggcaggaagcaccagattccagctgttattgttgccttcggttaacgcattagcttttaccaccggcatcaccagcgtacgggcggcgttgtttttcgcctgccaggaggcagaaataattttgtaatggtggttaatcagcgcgttgacagtccatttgcacttttccagaccaacagcggcctcaggcgtatcttcaatcacgcattccgggtgttcattggtggcgtcagccttcagccacaacgtgacgtccagcggatctttctcacgatattcgagaatgatgaaattgttacgatcgacaaaatcggtgcggctgcccattaaggagtgctgaattttaacgttttccggatcgagctgcgccgccagcggcgtgcctatctggtagttcacggtcgcgttaacgctaaagtcgttactatcgccagtaccggctttgtaatccgtaccaaccgtgaccagcggtaccggcgtatattccagccccaaagtgacggcatgaggatctttttgcagattatcggtgccaaacagcgctacttcatcgccgtagtactgttcgtaaactaatttagcgccaagctgcggataaaacggcagccagctttccatgcggatatcccagccgcgcgcgggtcgttcttcataaaagtcgaaatcttcggagtctttccagtcagaaagaggatggtaatagttgccggagaatttcaggtaatccgtccaggcttcagttcccagacctaatcgacggtgaccgcgcgtaaaatcgtagtcatagaatgcgttgccgccaagcagccagttgccgacgttctggcgaacgccaagcccaaagttaccaatggtgcggtcttccttacgctgagccgaaatctggctaaagaaaagcgtgctctggttgtcataccagggaataaaataatccagcgaactgccgtccagatcgccgccttcgcccacggacaggctggtacggatcttgccataaggtgacattacaccttcaagatatgactgtgctgaggaagtgatttggttttgcaaatagctacgcgcctgggattccagcgcttccggggtgagattatcaaagccctgggtggcggaattaataaagtagtcagcgccctgttctttaaaggactttcctttattttcctgttcttcttttttcgcggattcgctggctaaatcaggcagggaggagtggctttcatcatttgcagatgcagagttatctgcgccagaagccgcaactgagactccagacactaatagcaaaaccagaatgcgaatccttcgcaccatatgatatccctgtcgttaaataaaaacgcctctatgaaaagatattatatggatgattcagatggaatcataactaacaggcctaaatatattcctaaaaagaaaagtttaatatgaaacagatttataatattgatataataaataaaaagaaagctgttatttatttctaatattaattttcgggaataatattccctataaatagttgaatcaataaaaagaataaaataaccgccgggcaggatactatgctgatattacgggagtatcgaataacgcttttgcccttagccggataagacgtcggcgcctctgctctgcggcgcaacgtcgacagcggttttattgatcggaaatgacgaaattaacccgtttttttgaaattaaaccatgaccgttctggcaaaaatagtccactgcgccgcaggctttcaaaacctgtaacggctggcggcagtcaggacaaagtgcctgtaacgagaaatctttagcgcatgtctcgcaatgcgctgtatcgccattgcgctccagcgcgtgatggcaaacggggcaggttatttccataacattctcctcaggcgcgtgacttacttttacttgaaaggcctgatagcgcagcgcttgtcaggcctggaatattactgaaaaagcattacttgcttttcttgatatgtttcatcagacgcttacgtttgcgcatttgcgttggcgtcagtgtgttacgcttgttcgcatacgggttctccccttctttaaactgaatgcgaatcggcgtccccatcacttccaacgacttgcggaagtagttcatcagatagcgcttataggagtctggcagatcttttacctggttgccgtgaatcaccacaatcggcgggttatagccgccagcgtgggcatatttcagttttacacggcgaccacgcaccagcggcggctgatgatcttccaccgccatcgtcatgatacgggtcagcatcgcagtgctcacccggcgagtggaactgtcgtaagcctcgcgtacggactcaaacaggttgccgacgccgctgccgtgtagcgcagagataaaatggacgcgggcaaaatcaataaagcccagacggaaatccagcgtctctttcacctgctctttgacttcctggctcaggccatcccatttgttgactacgataacgagtgagcgcccactattgaggataaagcccagcagagacaaatcctggtcggagatcccctcgcgcgcatcgataaccaacagtacgacgttagcgtcttcaatcgcctgcaacgttttaatcaccgagaacttttctaccgcatcggtgatttttccgcgcttacgcacccccgccgtgtcaatcagcacatattcccgttcgtcgcgttccatcgggatataaatgctgtcgcgagtggtgcccggcatgtcgtataccaccacgcgctcttcaccgagaatacggttagtgagtgtggacttacctacgttcgggcgaccgacaatcgccagctttatcggcaggctttgcgggtcaaaatcatcttccggcgcttcttcaccattttgttccgcctcgaactgcgcccagtattccgcgtcttcatccacctcttcctgcggcgcgacatcatccatccacggcagaagcacatgttccagcaggctcaatacgccgcgaccatgtgaggcggcgatagggtaaatttcgcctaatcccagcgagtaaaaatcgacaaccgcctgatcgggatcgagaccatccgttttattcgccaccaggaaggtcggtttttcacgggagcgcagatgtttggcaatcgcttcatccgccggcatcagaccagcgcgcgcatctaccatgaataacaccacatccgcttcttcaatcgccagcagcgactgttccgccatccgcgtttcgacgccgtcttcggtgccgtcaataccgccggtgtcgatacagataaactcgcggccttcaacctccgcacgaccgtacttacggtcacgagtcagacccgggaaatccgcaaccagcgcatctcgggtgcgggtcagacggttaaatagcgtggattttccgacgttagggcgcccgacaagcgcgaccacaggtaccatgtttaaagcctcatttaaaaaatcatcagacaacgcgcgtcatttttacgccgttgttaaaaacaggaaaacggcccctacaccaggagccgttttttaaaacacacaaccgtgacgattaacgcgtaatcgcgtagaccgtaccgtctttggcctggatgagcagtttaccatccgccaccgtcggttcggtcagaaaaccggaactgtctactttttgttgggccacaaaacgcccgtcatcgacattaatccagtgcagataaccttcgctatcgccgacgactaaatcaccattatacagcaccggggaggtcagcaaacggtgcagcaaatcgctttgcgtccacagcgttacgccgccgtcagtggtcagcgccagcacgcgatcgttctgatcgaccaggtagatacggtctccgtcgacgataaagtcattgaccgaacccagctcgcgtttccacataatctgaccactgcgcagatccagcgccgttaagttaccattatacgccaacgcgtaaacgacgccgtttaccacaaccggcgtggtatcgacgtcgctcagacggtcaatttccgttgggccagtggcctgggagatacgctgctgccaaatcatctgcccttgttgcatcagcacggcgctgacgcggccattatcaccaccaacgatagccgcgccgaacgcggttgccggcgcagattcgccgcgcagcgacagcgaaggcatatccaggttcaccgtccatttaatggcgccatccgcctgatttagcgcctgcaactgaccgttgctggtatggataagaacgattccatcactgacaaccggacgagacaacgcttcgcctgcgaccttcgtctgccatgctgtggtaccgtcgctggtattcagcgcataaacctcggccttttcactgccgatatagacgtgaccgcccgcgacagtgacgccgccggacaacaacgcggacgaacgagagaaccagccgtctttctcgcccagattcacagaccagatctctttgccatcatccgcattgagcgcttttaccacgcccgcgcgatcggctgcatagaccacgttatctaccattaccggatgaaggttagaataaaattcgccaattccgttaccgacagaggtgctccagacagtggtcggggtaaactggttttcaacctgcggtaatggagacatcttgacgacatcttcttcgccgctaaacagtgaacagccgctgagcagggtaacggaaagcaaccctggcagaagtaatttacgcaattgcatcgggtccctctcagatggacaaattattgattttcatctgcatcatttcgctcaacgccggagaagcatcgctattgacgcccgcttcccatgcgctgcgcgcgccttttttatcacccttactcagcaacgcttcgccgcgcaaatcagcgacaatggctgtccatccttcgcctttaacggcatccagagttttcagcgcggcgtcggcttgcttaagctgcaactgaacgcgagcgagacgcagattaatcaccgctttgagattttcatcgctggtggccgccaacccctgctgcaactgggcttcggcttttttaagttcattcttatccacaaactgctgcgccagttccatagacgccagcgcaccataggtgtttttattctcagccgcgaatttttcagcggcgggaatgctatccggcttatcggcgcttaccgccgtcaccgcattttgatacgccagagaagcagcacgcgcggactccgtctgatggctgctccagtaacgccagccaaccagcgcgccaacccctaaaatcactccgacagccagcgctttgccgttttcggcaaagaagcgtttaatcgcatccacctggtcgtgttcgttctcgtaaatttccacgctgtccttctccttagcccaataaagtgcgcaaatgcgcggcgacgctgtcctgcgccactgccgtttgctcaccggagcgcaaatccttcactacaacagtcccatcggcgacttcagattcgccaagaaccagtgcaatacgggcgccccacttatcggcgcgggcaaactgtttcttaaagttgccgccgccgtggtttgtcattagcttcacgcctggcatttcatcgcgcagccgctccgccagcgtcattgccgcagactgcgtttgtgcgccggcagccaccaggtatatatcgacaacaggagaggcaataaattccggattaactgcctgaactaacaaaacaagtcgttccaggcccatcgcaaagcccactgccggggtagcgcgaccgcccagttgttccaccagaccgtcataacgaccacccgcacagacggtgccttgtgaccccagactgtttgttacccattcaaatacggtgcggttgtagtaatccagaccgcgtaccagacgctggttgacggtgtaggcaattcccgccgcgtccagcaatttacacaggccggcaaagtgctcgcgtgaatcgtcatcgagatagtcgccgagagcgggcgcgtcgttgagcagcgcctgcacgtccggattttttgaatccagcacgcgcagcggattggtatacatacggcgtttgcagtcttcgtccagcgtctcttgatgctgttcgaggaacgcgaccagcgcatcgcgatagttcgcacgcgcctctaacgaaccaatagagttcagctccaggctaacgtgttcagcgatgcccagcgcgcgccaccagcgtgcggtcagcataatcagctccgcgtcaatatccgggccttgtaagccgaagacttcggcgcctagctgatggaactgacggtagcggcctttttgcggacgctcatgacggaacatcggcccgatataccacaaacgctgttcctgattgtacaggagaccatgttcgatgccggcgcgtacacagcccgccgtaccttcagggcgcaatgtcaggctatcgccgttgcgatcctcaaaggtgtacatctctttttcaactacgtcagtaacttcaccgatcgcacgtttgaataacggggtctgctctacaatcggcaagcggatttcactgtaaccgtagctgccgagcacgtttttgagtgtgccttcaatgcgctgccagatggcggtttcgccaggcagataatcgttcatgccgcgaatggcttgaatgttttttgccacgtttattctctttctgaatataaaaatgaaccctcagcgcttccccgaacgaaccgggagccatgcgggttcaatcatacacgggaagcgcgccgcttcccatcacgttcttatttttcaacctgcagcacgtcaatccgacgcgcttcatcaagttgacttgctttcgcgcgaatacgggattcaagctgcgcgatcatatcgtcgttatcgagtctgtccttacgcacgccgtcttcatacaggccgcttttcttattgccgcccgtcacgcccagcgtcgataccagcgcttcgcccggcccgttcactacgcaaccgatgatcgagacgtccatcggggtgatgatatcttccagacgctgctccagcgcgttcaccgtgccgataacgtcgaactcctggcgagaacaggtcgggcaggcgatgaaattgatgccgcgcgcgcgaatgcgcagcgacttcagaatatcgaaaccgactttgatctcttccaccgggtcggccgccaacgatacgcgcagcgtgtcgccgataccttccgataacagcagacctaaaccgatcgccgacttgaccgccccgctacgcgcgccgcccgcttcggtgatccccagatgcagcggctgatcgatctgtttagccaacaaacgataagactcaacggcaaggaatacatcggacgcttttacgctcactttgaactgatcaaagttgagacgatcgagatgatcgacatggcgcatggctgattccagcaacgcctgcggcgtcggctcaccgtatttttcctgcagatctttttccagcgatccggcgtttacgccgatacgaatagggatgtttttgtcgcgcgcgcagtccaccaccatacgaatacgttcttcgttaccgatattgccggggttgatacgcaagcagtcaacgccgtattccgctactttcagcgcaatgcggtagtcgaagtgaatatcggcaaccagcgggacgttaacctgctgtttgataagcttgaacgcttcggcggcgtccattgtcggtacagaaacacgaacaatatctgcgccaacgcgctccagcgctttgatctgattaaccgtcgcttccacgtcagtggtacgcgtgttagtcatcgactggacggcgataggggcaccatcgccaatcggcacattcccaacgtaaatacgtgtcgattttctacgttgaatcggagcctggttatgcatgaaaaacctcccgcgttacccgtctgttactgcgccggtgtcggttcggcattaagggtcagacgcgcaacctgattagttctgataaagcggctcagatcgacaggttttccttgatactggatctgcaccgcggccggcgcgccaattttaagtttataaggcgcctgaccggttaggtttaaattaccatctttacgctgcataccgctaaacagcttcttacccgtggcgtcagtgacttcgagccagcagtcagcggtaaaattcatcaccagcgcgttcggatcggcagcaggcgccgctacgccagcctgactggtcggcagcgcggacggcgtctccgttgccgctggcgcggcagatgtcgcagccgtatcgacattcgcctgcgaaggcgcgactaccgtattttgcgtcgccgccgccgttggcgctggcgtttgcgtcgccgccgtcgaatcaaccggcgtcgcaggagccggagccgtttgcgctggcgtcgtatcctggcttgtcgcggcaccggtgtccagcggtacgctttggccgctgtctttatctgcgttcagttcagccgtgctttgatcggccatcgtcgtgatctcttcctgctgcgccttgtggttctgccaccaccaggcgccggtcagccctacgaccacaaacagtaccagccaggtaaaagacattaaccagccgtcgcgttttttacgacgctttcctaatgagaaactctgcatcggggcgactttagcggcgcgcagcggagcttgtttttccagccccggcagcagttcctcttctggaacatgcaccagacgcgcatatgagcggatatatccgcgcaggaaggttgaagcaagatcggacggcgccttatcttcttcaatatcgcgtaccgtagaaaccttcaggcaaagtcgctcagcgacagcctgctggctgagtccgagttgttcacgggcattgcgcagacgaacgccggtggtttgtgcttcattttggtcgtgcgtggcttcagtattcattcgctacagctacaggtacgtgtaaattaggattcaggcgccgacgagccgtaatgcccgcccacaccgcgaaacatcaggttagttaaccttagtcagacagtataagcctgtcaggccgcagatgacaaaaccgctaagacacaaggctaaactcttgttgcaccattacatactgccttaaagtcgacaaaaacgcaccgttattattgaccagacaagtacaacgccagacattattcaactgacattgcgccacggtataatgaatgccccgtggcgcaactgctatcaaatagccttgatgtcaatcacctctccctgcatacgcttacgcagggtacgtttggtacggtcaatcacatcgccagccaactgtccgcatgccgcatcaatgtcatcgccacgcgtcttgcgtacgatggtcgtgaaaccataactcatcaaaaccttagaaaagcgatcgatacggctgttagagctgcggccatacggcgcgccagggaacgggttccacggaatcagattaatcttacaaggcgtctcttttagtagctccgccagttgatgcgcgtgttcagtgccgtcgttaacgtggtcaagcatcacgtattcaatcgtcacgcgcccctgattggcgttggatttctccagatagcggcgaaccgcgcccaggaacgtttcgatattgtattttttgttgatcgggacgatttcgtcgcgaatagtgtcattcggcgcatgtaaggagatagccagcgcgacatctatcatatcgcccagtttatccagagcaggcaccacgccggacgttgagagcgtgacacgacgtttggacaggccgaaaccaaagtcatcgagcataatttccatcgccggtacgacattggtcaggttaagcaatggctcgcccatccccatcatgaccacgttggtgatcggacgctggccggtgactttggccgcgccgacgattttcgccgcacgccagacctgaccgataatttccgatacgcgcaggttgcggttaaagccctgctgcgcagttgaacaaaacttgcactccagcgcgcatcctacctgtgaagagacacacagcgtagcgcggtcgtcttccgggatatagaccgtttcaacgcgctgatcgccgacagcaatcgcccacttgatggtgccgtctgaagaacgctgctcttcaacgacctccggcgcgcgaatttccgcgacctcttttaatttgccgcgcaacactttgttgatgtcggtcatctcatcaaaattatcgcagcaatagtgatacatccatttcatcacctgatcggcgcggaaaggtttttcacctaagtttttaaaaaactcgcgcatctgctgacggttgagatccagcaggttgatttttgtttctttgttaggaactaccggggtactgctttcaggtgtgacaatttgttcagacatatgctattccggcctcgttattacacgttatggcccctggagggttgaaaaaagaaacgccccggtaagcttactgctcgtccgggggcgctgcattgtacaaattctggcgtaaggatgccacgtctgcacgcggcattagcaaaaataatatttgaaccgataatttatcgccaacgcatttacagcgtgaaagacgaaggagattaacgggtgcgcgggcacacttcgccttcaccgaagaaaaaggcgatttcgcgctgcgcggattccagcgaatccgaaccgtgggtgccgttttcagttaagctatcagcgtagtcggcgcgcagcgtacccgccaacgcgttcgccggattggtggcgccaagcagatcgcggtgacgctgtaccgcattttcactttccagcacggataccacgatagggccagaggtcatgaactccaccagaccgtcaaagaacggcttgccgtcgtgctcagcatagaagccgcgcgcctgctcaacggtcaggtgcagcattttagtgccaacaattttgaaccctgcagcttcaaagcgcgcaaagatgctgccaataacgttttttgccaccgcgttgggtttaatgatggaaaaagtccgttcaatagccatgtttacctctgaaatatgttctgttgttatgtcaggcgcggattataaagagcatcccatcaattgcctatggatgcaggtaacatttttttaaaataaaatgagcattagcaacaaaagttaaaggcgcacagcaaactcaggggactgacacagcacgcagtgcgtgtgttcaggcgtgagagcatgaaaagtacgtttgcagatgtcgcaggtgagcgtatacgccgtactatgccgcgttgaggcgggttccacgtcaaaccgcagccgcagcgcctgatgcggacataccgccgcacagccgccgcatcccgtacaacgcgccgccgctatcgtcagggtattgtcgtcaaactggataacgttttccgggcagcttcgccagcaggcgccgcacatcctgcactcttgcggactgatttcgggtacgcattcgctgaacgcggaaaacgcctgtctgagacgccgtttccccggctcgacggcgcacggggtaatggcgtcgcgcggaacatgaaacagagtgcgccgcgaggcgttaatctccgcgccgacaacgtgtttgaaagaccagcccggctcgccgtagcggcgcagcgctaaatttagcctcgccagcgccatcagccactgcgccgatcgctccaccgcaatatcaataaagcgaataccgtactggctgtgccagagaagcagttcatcgaccgttggcgcctgtagcgaaaacggccccaccaacgtatccccctgcacaaagcgtttaaccggtttgataccggtaatggcgtcaacaggacagacaaacagacagtcgccacaggctatgcagcgcgtcgtatctatgctgacctgcccctgcgccagcgaaaacgcctgcgccggacaaacatcggcgcaagcgcggcaggaagaaaaacgaaagcgacgacggacgcaggcctgcgtcacgtctaccgccggatcgatcgtcaggttaaccatcagccaatactaaagaagacgtagcgcagcataatctcgccgagaagcagcaatacgctgcccgccaccagcgtccctctggcgtttcgcagaccgcctgcggcaaagcagagcattcccgccgctgagacacaccagccgagaagatagacgtcacgcaactgcgccagcgcctgtagcggatgatgcgggaaagtgacgaccgtcgtatccaccgcattaatatccgccagccatagcggctgcatgatcaggcgaatcagcaccatcagtgcgaccaccaccacagcgcagcgcattgcggcgccagcgttgcgcagataagccagcgcaatgactaccgagccgataatgcctgacgtgccaaagaacagcgccagcgtgttgctatgctgccaggtcgccaccgaggcatggatataaacctgcgccatgcagaatacatccaccagcccaaacgctgccgccagcgccagcagcggctgccagcctggctttcggaaaaacagcagcacaatccctagccccagcgccgccagataaaggctggcaaagacgatttcgcgactcagccacgaactggcgacatgacgtaacgcatttagcgcattcaggggatagcccatgtgcagcgctgaagcaagcagccccacgcaggccagtacaaacgcccccgccatcgcgggaagcgcgccgcgtgcaggcacgcgtccctctacggcgtactggcggcccaacgccagccacactgtcacgcccacggacccttgcaaacagagcgtaaaaatcagcagcggtaactcatgcatggcgtttaccctctttttctgcgccctgatgcgctttgacaaccagattaggtttggttatggatgaatctggcagcccgttaacgtcgcatacgctaccgtacttcgcgcgcagttcatcaatcggaccaaacttgatggcctccagcggacaggtcgcaacacagacgggcggttcacctttcgccagtaaatcaacgcacatgtcgcacttagacatttggccggtctgctcgttaagctgcggcgcgccataagggcaggaccaggcgcaatagccacagccgacgcatttgtcggtatcaacgcgcacaatgccgtcacccgggcgtttatgcatagcggtagtcgggcaatttttggtgcagacagggtccgcacagtggttgcaggaaatggaaagcgtataagcaaatacgttattgctgaccccaccctgcccggtcgggatgaaacttccgcccttgacttcatagacgcggcggaaacgacggcctacttccagattgtttttgtctttgcaggccacctggcaggctttacaaccggagcagcgtgaggagtcgatgaaaaatcccagttgtttatcgctcaccggcgggtaatgtgtaaactgactcatgctttagccacctccaccagcatggtttgatgtgaatttcccttcgccagcgcggtaatacgggccgagctgaggacgttcgcacagccgcctttatcaacgccgttttcatccggctgccaccaggcgccagcctgcatcgcgacaacgccgggaataatgcgcggcgtcacttccgccgggatttcgcaaatcccgcgtgagttatgaatgcgcaccatgtcgccatgcgtaatgccgcgcttttgcgcatcctgcgggttgatccacaatgtctgctgctgcacttcaatcagccacgggttagcgtattgcgttgagttggcgcggttttttcctttccacgtaattaactggagcggaaaatctttcgccagcgcatcctccgggccttcatgcgcgggaacgtagtgcgataacgccgggatttccggatgctgcatgtcgtagaggcgcttcgagaagatctctattttccctgacggcgtcgggaacggatgattttccggatcgcgaatattgtcttcaaaggcgataaatggcgcgcttttgaacagatgctgacgggtcttttgcagcgtggcgaaatccggcagattttcgtccggcatcgccaggcgcgtctgttcccagatgtgttcaatccacgctttctcatcgcgcccctggctaaattcattctcaatgcctaatttcgccgccacctcacgtagccagtcgtagtcggagcgccgctcaaattcaggctcaatcagtttttcagagagtatcaggtagcttgccgtgccccaggtttcaccgatgttccagcgttccataaagctggtttccggcagcagtagatcagcgtatttcgcgctcggcgtcataaacagatcgctggcgacaataaactggatctttgattcatcctccagtacgcgtaccgcctggtgcagatcggggttctgattcgccagatagttcccggccagcgagaacagaatacggatgttactgtccagcttatcggcatctttcagccccatatccggcgtcactttgctggcgtcgtctgcggcctgcacccagttcatcaccgaaattttggcttttaccgggttatccggcatctccggacccgcggcgaatttacggttagcgcagccgccgtaacccgcagcccaaccgcctttgatgccgacattaccggtaatggtcgccagtagagtcgaaccgcgcgcggtgcgctcgccgcagttgtggcgctgtggtccccacccctgaatcaacgcggcgggtttggtattcgcgtaatcacgcgctaactggcgaatggtttgcgccggcacatgggtgatcttttccgcccactcgggggacttaacgacaccgtctttggcgccggtcagatacgccaccagcgattcgttagccggtacgccttccggcattgagtcttcatcaaaaccgatagcgtaacgcgcaataaatgcgcgatcgtgcagattctcgctgatgatgacgtacatcatcgcgtccatcagcgcattgtcggtggtgggcagcagcgggatccactgatccgccagcgacgaaacggtgtcggaatagcgcggatcaaccacgataaaccgcgtaccgttctgcttcatcttctgcaagaaatagttggtatgaccaaaaatggtctccgtcgggttatggccccacagaatcaccagtttggtgtccaaaagcgtatccagtgaactgccgctggcggcaatgccgtaagtataaggcgtcgcggccgccgtgttgcccatactcacagaatggtagctttcgagatatccgccggtcagattcaacaggcgacgtgccattttatcgccggaaaaggtgccgccggaaacggcggtaccaacatgaacatagcgcgaagccgggccatatttttcagtaatcgattttaaattatcggcgattaaggttgtcgcttcatcccaggaaattcgctcaaattttccttcaccgcgttttcctacgcgcttcatgggatatttaagtctgtcaggatgataaacaaatttacggtatgcgcgtccacgaacacaggcacgcatcaccggcatttgcgcatccagcgcattatccggtcgcgttgaaattcgcgtcacgataccgtcactaacatgcgcccgaatatcgcatttgcccccgcagtcaaaagtgctgcatgtctgaacgactttttccgcaggcctgttttcagttgccgtcacagcgcgcgcctgagcggtagctggcgaggagacaaacggtaacgcaataagcgcggagctggcctggataaagtggcggcgagaaatagcgggctgttcgccatttccctggctttttatatttttcatgatccgactcgtcaaataaaaacccattctcacgtttttatgcgctggttctcttgatatttatcaagctccctcattaagggtaattccggaaaaattaataattctcattaactttaaattaaatgaaattcataatttattctgaagagttgttaacgtattaattcaaaattaaccgctgcaacctgaccggactcatccattacgacaagttgataacgtccagcgatattgagtaataaagaaaggcgattattttcgccattaacaggttcgccatttaaaaaccaccagcgacgccctttgccgccggtagtcgagacgggcagcgtgacgttttcctggcctggcaattgcctgatcaccgcgccatccctcactcctgacagcattaacggcgcggcgtcattgccctgtagcggcggacagtggtcggacgccgcgggcaagcgggcgctacgtctttccgcaggcggcagccacggctccagcggccgcggccagacgataaacgtatgcgcacgcgcctgcggacagtcggcagcgacacgccgccccgtatcatccagccagaccgggaaacgaataccgttgatgtcttcctgctcaggtaacagcagcgtgggcggctggctgtcatcgagcagccatgtcgccagtcggcggcgacagttgctgtctccggcaggcagagtctgtccgcccggccagcaaatgacgccgcggcttaccgcctgcggacgcggatcttccggcaggcgtcccgtatgcgccagtaacagattattgacctggttaagcaatggcaccgcgctggcaaaaccaaattgccccaccacaggcgtgccgtcgggtctgcctgtccagataccgatgatatagcgcgcgttaacgccaatagcccacgcatcgcgatagccgtaactggtgccggttttccacgccaacggcacaatgcgcggcagcgcgttatccggcaagggttgcgcttcatccgccataatccgtcgaatgatccacgccgctcccggcgacattaatggtctttccgacagcggatcgtccggctgtaaccgtagtttcgccgctttcccatgacgagcgaacgcgctgtatgccgccgccatctcgtcaagccgcgcgcccgcgccgcccagaatcagcgaaagattgggcgccgcgccagcaggcaaatatagcggcaggccgacgttacgcagttttgccgcaaatcgtttcggcccataggcttcaagcacctgaacggctggcagattcagcgagcgtaccagcgcgtcgctcatgctgaccgggccgtgaaatccgctgtcgaagtttcccgggcggtaatctccggtacggcgcggaacgtcctgtaataatgatgcgggatggatcaagccgtcatccagcgccagaccatacacaaagggtttgagtaccgatcccggcgatcggatcgccgttaccatgtcgacatgaccaaaacggctgtcgtcattaaggtctaccgatcctacccagccgcgcacgctcatatcggtatgatcgacgacgatcatcgccaacgaactgcgtgcaggcagccgccctttccatgcccgcgccagatcttccagttgccgctgcaacccggcgtccagcgtggtcacaattttgtcgttctggcttttactcaacatcattcgggcaaaaagcggcgccagttgcggcatttgacgcggcgccagccagaccggttcttcacgcgactcgcgtaccgtttcggcaggccagacgccctgcgccgccatccgatccagcactttatttcgtgccgcttcggctctcgcaggccagcggtcggggcgtaaccggctcggcgcctgcggcaatacggccagcagcgccgcgtcagcgtagctcaggcgcgcgggcggcttgccgaagtaggcccagcttgcagcgccaataccctgtagcgtgccgccgaacggcgcgcggttcaggtacagcgtcaggatatcgcgcttggacaaatgccattcaagctggagggcgcgccaaagctggcggattttaccgccgaacgtgcgcgaatgcgggtccagcagtctcgccacctgcatagtcagcgtactgccgccggaaataacgcgcccggcggtaagatcctgccatgccgcgcgcgcgacggagaaagggttaacgccagggtgccgccagaaccagcgatcttcgtaattgattagggcctccaggtagcggggagagacctcttcaatcgtcaccggataacgccagatccccccggcgtcggcaaagcgccacagcggcgtaccgtcatgggctaccacgacccgcgcaggatggacctcattgagcggcagcggccagagtttatccgctgcccataacgccaggaaaataaaaagcggcgcgcccgccagccacagccagcggccacgtttaccacgccaaccgttcatttaaggcgtcacaatcagcagcccctcgctcgcgccggttgcccgccactgaggcgcatacatcgattccacctgcggttgcgcaagctggtacgtccccggcgttaccgcgcgcgccaggtagaccagcgtcacgggctggccctcattgacaacgacggcagccacaaaccgatcgtcgcggaattccatatactgaatatccgcctgctgcatctgattaagcagattttgcacttcgctaccgctctccggcaggctggcgctgctgtcagccagattctggttttccagctccagcccggccgggagcaggtccaccaccagcgcatccggcacattgcgatcggccactaccgttaaccagaccagcaccagttcgccgctacgcaacgaggacagcgatttacgctgaccatcggtccccagtatttgtcgttcaatctgcaaaacgttgctggcaggctcaggcgcagatgagggatagccgctgctatccagacgcagccatagcggctggctaccggtgttcgtcacctcaagggcggccagctggtcagcatccagattacgggtcagcgccttgtcgcccgacagcggctgcgcctctaacgaggtctgcacctgccaggcgcccgcgctggcctgtcgcgaatgcgcggcgaggaacaaggcattgttctcctgggtagagagccagcgctgaccgaaggcctgctcagaaagcgagcttaatagcgcgttttgcgcgtccggtctgaggttgttctcttccagtagcgacaacatcagagcgttatcgcgcagagaactgccgtaatccgctatccattgccgttcgtcctgacgcggcgtattcagagccagcgtaatggcctcttcgccgcgtctggcatcacccatcgtgtttaacgcgatgcccaattgcatcagcggcagtcctgaagccgcctgactacggcgctcccagatttcgcgcagcgtgccgagcggcgctttctgctgacgcgccagtaccagcgcagcgtaagcctgagcggcaaaagtactggcctgagtattatcgctataacgaatcagcatcgtaccgggatcctgcagatagcgcagcagtcgctcattgccccggttaatggcctccggcgggacgctatatccctgctcgcccgcgcgaataaggaaatccatcgcgtagaccgttagccagggctcttccgccccattttcatcccatagcgcaaaaccgccgttatcacgctgcatctgtagtatccgggagatgccgatatctaccgcagcgcgccgtttttcatcgctatcgccggtaataccgagcgactgcaattgagcggcattggtatacagcgccgggaataacccactggtggtttgttccaggcacccgtacggatatgctttcagctcgcgaatgtagcgcgccagattgagcggcggttttccgcttaacagcagttgtccctgtaacgtggctggcgagatgtttgccagatgctgctctggtacatgccagctctctcccggagccagcgcaatgccgctatttaccgtttgggcaggccaggccggacgcacgccgatttgccactgcttatgctgcgcgtcgagggtttctcccggcagattcagaccgctaatggtcgcctggatttcgccttcgccaaaaccttccagcgcgcgtaccggaacgaataaggtggtgcgcacgcccggcgccaggttgaccggttgcggctgctggctaagcagttccagtaacccactggcggcgagcgcaatattcagcgtctgcggacggtcggtcagattggtgacgtccagcaccagtcgcgaaacatcccctcccgccagaaaacgcggcatattcagctcggcaatcactggcgcggcgacaacgactttgctttcgccgcgaccaaaatcgtccgctgtccatgcctgcgccataacccgcagttcgccgttaaagtcgccaatcggcagcgttacgaccccttcgccctgctcattgagcgtgatcggctgcgcctgctgcgcgatgatattgacatggtttaccggcggttttccgccgcgcttaaggtcgtcgccatcgccgccaaaacgcaacgccgccagccgcccctgcccttcaatgacctggccgtaaatatcgtagatatccgcaccgtagcgtttttgaccgaagaacgcctgccacgggtccggcgtcgcgtaatcggtgatgttcaatacgccgctatcgaccgcggagaccagcacgttgatctgttttggcatttcgccgtgtttaacgctggctttaaccctgacggtgagcggctgattcgggcgcattttagccgggctttccagcgccagatcgaggcggcggttgtcatcccccagcggtagatgtagtaaccccacggcgcgttttggcgtcgcggaacgagatttatcgccgggacgcaccaccagcgtactgagatagagatcgtggcgattccaggttttatccaccggaatcgtgagctccagcccctgcgccggcacgtcgatcgcctgccaccacagcggaccatcgctggactccaccatcgcataacctttaccggcgaccggcgcggcgatatgcaatttcatggtatcgcctggacgataattcgctttatccagtttgagggtgacgcgatccggacgcgccgcgccgctaccgtcgctgttatcctgccagctatagccggcccagaaacgaacgctgctgaccgtctcattcggcgctttgacctccagacggtacgcgccccattccaccgggaagctgacttttccggtttcatccgcgttcagatccagcgtctgctcgccctccaccagatctttttgatcaaactgcgactgccagccttcgctttccgaccagttccagtaatagtcgcgacgctcgcggatgagccgcacctgtaaaccggacaccgcttttttctcgccctgcgcgttggcgtaaacaatatcgaatgcggcgttgctgtcttcgtcgacaatcggttgattaacggtggtatccgtacggtagtcgtataccgctttggcggcgaactgtggacgaattcccggtaacgtatcggcaggccaaatcgcctgctctacgcgacgagtgaccggacgaccgccagactccagcaggctggcctgtagaattacctgcagcggcgaatgcgcttcttgccactggctggcagcactcacttcaccacgtccgcctttatccaacgtcagttgaacttcgtccaggctgcgcgaaagattctcttcggcaatattgccgaactggaagccaggcaacgccgcgacagcgtcgcgcaggggacgcaggaaaagttgcccttgcagggtattgccgttagcaggcgcgccatacaagtaatagccgacaacggagaatttcacctcatccgcaggcgccagcggtgttttttgcgccgtcaggttgagcgccatccgctccggcataaagtcttccacgtggaaatcccaactccgcagcaaattatcgccggtgttggcgcggacatgccacaagccggtcggcgcgttgatatccagcggataattcaaacggtatagcccgttttccggctggctgacgacggtacgcatcacctgtccgtctggttttaccacttccagcttaacgggttgatcgggcagcgttttaccgtcgctatcgcgcagtaatccgttgaggataaccgtttcgcccgggcggtagagatcgcgcgggccgaacataaagaactgcttgctgtagccgggcgcgccagcgacattaaattccgacagatccagagccggaagcgtgagatcgagcagcgtggtctgctcctctttacgcgccagtaatagcgccgccgctttatcagcctccagttgcacatgtccctgcgcgtcgctcgtcgcctgcgccagcgtctgccctttatcattcagaagaacgatctcaattcccgactgcgccgcgccgttttccaggctttgcgtaaagatatccagccgattatggtaacggtgcgcggacacgccgatatcgctaagggtaaacaacgtagcggcattactatagttgtagtgtccagcctgattcattaccgccacatatacgcccgcctgttgcagcggcttaatatcgcttaatggcagcagcagtttctcacgcgtattgcgcgccggattaagatcaaaacgaccggtataaaccagatccgccattttcagcagattgtcggactcccagttagagagagaactacggtactcccactggctgacaaatgacgccagcgatccgggcttaacgcggaaaaagttcacatcaacgtggttgacgttaagcgccatgaccggcagtccttccgcgattttccccggtagcagcgatccccggctggcaaagccgacgctgggctggacatcacgcgtggtaatcgttttttcataagacttgccgaaggtggcgttattcagcgccttaacggcgggatcaaccgtgaccaccagcacgcgctcaggttccagatgacgtaaccttagctcttttaaatttggcgccagctcccatgcgccgtcaacgctgccgcttttcttatcaaccacgtgaaccacacgggagaaatcctgttcaggatctaaaggaattgaaaacgtcagcaccagcgtcgccgcgccgtcgagctgcgcttcggaggcgtctaatagcgtgagcgctttgccctggctttgctgcgccagcttttgtagctgtgccgggtcttgcgcgggcgagggctgcgctacggctggcgcttcgcttttagtcgtcggggcggttttatcgttgttatcgcatcccgccagcgccagcatgatcatgcaggccaccacgcgtaaatgtttcatctttcatccctggccttaacggcctgtcagcaacggttgatgagatattatgcgcgagaaattttattgtgtaagtccgtattactgtgatgatgcgaaaattttacgcagaaatgtggtttcgccagccaaaacagcctcttctacttgtcccttttcgggaaacgtccgacaatttgaccataatcaggtaacaatggagatgcccatgaccaccgccttttttgtcgccgccgactggcttgccgaacatattgatgatccggaaatacagattcttgacgcccgtatggcgccgccaggacaggaacatcgtgatatggcgggcgaatatcgcgccggacatattcccggtgcgctgttttttgatattgaagcgctctccgatcgcgcatcgccgttgccgcatatgatgccgcgcccggaagcgtttgcggtagccatgcgtgaactgggtgttcgtcaggataaacacctggtcatatacgatgaaggcaatctgttctccgctccgcgggcatggtggatgctgcgcacgttcggtgccgagaaagtgtccattctggcgggcggactggcgggctggcagcgcgacgaatggctattgcgcgaaggcgaggaagcgcatgaaggaggcgagtttgaggcgaaattcgcgccgcaagccgtggtgcgtctcaccgacgtattgctggcaagtcatgaaaaaaccgcgcaaatcgttgacgcgcgtccggcggcgcgttttaacgctcaggctgatgaaccgcgtccgggactgaggcgcggacacattcctggcgcgctaaacgtcccgtggacggaactggtgtatgagggcgaattaaagaccactgacgaactgaatgaggtttttttcagccacggcgtgagtttcgacagaccgattatcgccagctgcggttccggcgtgacggccgcggtcgtggtgctggcgctcgccacgctggatgtgcctgacgtcacgctttacgacggcgcgtggagcgaatggggcgcgcgtaccgatttaccggttgaacccgcttaatatccgccatgccggatggcgctcacgcttatccggcctaccgttcaggctgatgtaaaacgatctacagacattgtttttattccgctcttttccgctgtcctgcaaacgggcattattttctcttaataaaatcctattttttatcggtaaatactttacgtccggtataaggagtatcattaccgctgtttttgttttcaccggaaaataactcctgtaaatataattttttaaggatggaaaatggatatttcactcactaatttaattgagttggttaaaaaggttaaccgtaataaggtacctactcctatgtctgccgaggaaataagtcgtctgcgagtgcgtaagtatcgcgatccgcaaaatacggaaaccactgagttacctgaaagcctgaaggcgctactggcctacgaccgcgatctcctgagcaattataatatgcctgtgattgaaacattacaaaaatctattgataacgagggagtaattcattcttactcccctgatgaagaggcgtattacggcgttggcatggatagctcaggtattgatattgaagatctgatgcctgtctggagtaacgatccccgtcttccggcattaattcgtatcgatcatgtcggcgatcaggccatttttatctatatcacagaacgggatgccaacggcgaataccctattgcccgcatggaacgtaatgaattctggctggcggagtcttccctggtggaatatctctataatattatttcgggcgctaaagacattggctttaccgaagaggatttacatcttccgcaatggaaggcacagcaaaaaatgaatgaacaacgcgatgccgctttacttgacctggaggattatcatgaggcgttttgggcaaaactggacgcgctcgtcgattaatcgacatgatgtcgggtggcgctcacgcttatccggcctaccgttcaggctgatttaaagcgaatctacataaattctgtttaagcaggccacaaaaaaaccgctcaattgagcggtttttttgtgctggtccggttcgcggcctttccagcaggctttgttgccatagcaacgcaggcacaccgtaggggattaatactcccttttaagggagcaaatgtcaatatgatttaccgggaaactattcaatatttgaggtattatctttcccggccctttccgccgtctcgcaaacgggcgctggcttcaggagaggataacccatggccgtaagcgcaggcacaccgtagtgcctgctatcacggcattatcgccagcggtgctgccgtgatgcggtcttcgcaaggaccgcaacatgaaggtacgatgcttttgtgtcgtgcttcttgtttctggcacgttgtgtcttcacgcagacagaagctacccaggtaattctgttcccgtaacgctcaacgtccagagcaggtaagccaggaggccgccctgttgggcggctttcttttcttcagatgatgcggttctgtttaaaatcgcgcaggaacccgccccagcggcgctcgtagaacggcgcgatatgctcggtgataaagtggctgataccctgctcgcccttcctcacctgacaaatatcgatcggttcgtcacccggtaacgtgtcggtcgccacattgcccgctgcgtgaatgatctcttcaatttcgccgtcagcctcaatgccaatcagcagattgggttgggcgtccgcatgttctttaatcgcgcagagaaacgcgcgtttcaccggtttgatggttttaaacagcgtagtgagggaatcaatcatctgcgacggcggctcggccacttcggatagaataagcgactcgccgccttccagcacttcctgcgtacttaacggactgccttcctcagcgagaagcaggctgatttcacgcggcataaactctttgccggtcggcaatttagcgttgaggaatagcgtttcgccaagcgtcatttcaaacagcgtgcgcgccggcatcaccacaaacgcctgttcgtcttccacggcctgctgcagcgcctccagagaagtaaagaagggaatgacggtcgtgccgtcttctttttcccagtgctgcaaatccagagcgctgtcttccacaatcgcctcgccttcggcagcgctgcccggcacccagacggtggactccagtaaggtacggaaaaatgccggacgatgcgcgggctcagtcgccgctttctccagcaagatttctaattcatttttagtttcggacataggaatcacaaattatgtatatgggttgtaggcctgataagacgcacggcgtcgccatcaggcaaaatgccgggtggcgcttcgcttacccggcctacaaaaacaccgttcaggcggtcagcaaattcgcgatggtgcgcacacccagaccggttgccccggcagcccactgctcaaccggcgctttgcgataagtggcggaacagtcaatgtgcagccagccttcgcggtaattttcaacaaagtgcgacaaaaaacccgcggcggtgcttgccccggcgggataagccgcgctgccggtgttgttcagttccgcaaagttagacggcagctggttacggtggaactccgccagcggcagacgccagaacggttcattttcttgcgccgcgctggtcaacaagcgccccgccagcgtatcgtcaaaactgaatagcgcatggtagtcgttacccagcgctgttttcgccgcgccggttaacgtcgccatatcaatgattagctgcgggtgttgcgcgctggcgtcaatcaggccatccgccagtaccagtcgcccctccgcatcggtattcatgacttcgacattcttaccattacggtagcgaataatatcgcccagtttaaacgcattgccgctgatcagattatcggcgcagcacaggaacagttttacgcgtttattcaacccacgggtaatggcgaacgccagcgcgcccgttactgtcgccgcgccgcccatatcggatttcattgagtccataaaagcgctttgtttgatactgtagccgccggagtcaaaggtgatacctttaccgaccaggcaggcataaaccggcgcatctttgtctcccgtcgggttgtaatccagcgccagcagcaccggcggacgctcagaaccacggcctacggtatgcaaccccatatagttctgctcgcgcagatcttcgcctttggtgatacggtaagtgacgctatcgcacgcgacgctgcacagcagatccactgcgcgctgcgccagttgctccggcccaagctcttccgccggagcattaatggtgtcgcgcacccagtcaataatggtcaggcggttatccagctcctgacgttgggcatcgtctaaatccggccacattacggtacggacgccttttggtcctttgtaacccgcccagaatgcccaacaacgctcggtatcccatccttcgcctgtcagcgcgacctgttttattcccaggccgtcgattttacgcgccgcacgctggatcaatcccagatcgtctttaccgttaagatgcaaggtaataccgtcgttattaatactgtaagtggctttatcgccccagcgcgcatcggcaggctgcgtggaaagcgtaattttcatggcttctgtcattgttattttccttattagcaaacgggccgccgtagggcagcccgttagatcttttgctaaatgattcgcgttgcaggaaggcggcaagtgagcgacaaattcgtcgggaacgaatttgcacagccaaaggctgcctctggtgagggacaaggatgtccctcatcatccccgggagcatagcaaactatgtgactggggtgagcgaacgtagccaacgcacctgcggcgaggatcatgacgcaaaaattactctgcttcatccaaccagactagcagaatcgcctccagaattttttcattggatgcgttagggtcgtcgtcaaaatcgtccagttcgcagatccactgatgcagatcggtgaaacgaacggttttaggatcgacatcaggatatgcgtcgtataacgcttcgccgatctcgcggctatcggtccacttgagtcccatactaccctctgttaatgctcacgcgcatggttgattgtgtaacgtggaatttcgataaccagatcgtcgtcggtaacgcgggcctggcagctcagtcgactttccggctccagcccccacgctttatccagcatatcgtcttcttcttccgaactttccggcaaggagtcgaagccttcacgtacaatacagtgacaggtggtgcaggcgcacgatttctcacaggcgtgttcaatctcgatgccgttgcgcagcgcaacgtcaagaatggtttcaccggtctcagcttccagaactgcgccatccggacaaagatcctgatgaggcagaataacaatcttcggcatgttaaacctcgtctacggaatggcctttcaacgcgcgacgaaccgactggtccatgcggcgagcggcaaattcctgggtttgtttatctacgtttttaatggcttgttctatggcgtcaacatcatcgccttgtgcgaccgcgcttaaatgtgcggcggcatcatcaatgcattgacgttctgcggcgcttaacagcgcggcgtcggcagttagcgcgccggtcaaactttccagcacgcgcgcggcttcgactttttgctccgccagcatacgcgctttcacgtcctgctcggcaaaactcatggaatccttgatcatcgaggcgatttcgccatcggtcaggccataggaaggtttgacctgaatggaggcctcgacgccggtggatttttccattgcggtgacgctcaacaggccatcggcgtctacctggaaggtcacgcgaatatgcgccccgcccgccggcagcggcggaatcccgcgcagcgcaaagcgcgccagcgagcggcagtcctgcaccagttcgcgttcgccctgcatcacatggatagacatcgcggtctggccgtctttgaaggtggtgaaatcctgcgcgcgcgccaccgggatagtggtgttgcgcggaatgactttttccaccaggccgcccatcgtttccagcccaagagagagtggaatcacgtccagcagcagcatttcgctgtccggcttgttgccgaccagaatatcggcctgaatcgctgcgccaatagcgaccactttatccgggtcaatagcggttaacggcgtgcggccaaaaaattcgcccacccgctcacgcaccagcggtacacgggtcgaaccgccgaccatgaccacttccagaacgtcctggggctcaacgccggcatctttcaatgcgcgacggcaggccaatagcgtgcgcttaaccagcgcggaaatgagatcgttaaactgctcgcgagtgatctccccctgccagcccgcaacgttaacgcgaacggtatcggcatcgcttaaggcgattttcgccgcaatcgcggcatccagcagttcgcgctgaacgcgattgtcgctacgatcggcaattcccgcctgctcacgaatatagtccgccagcagatggtcaaagtcgtcgccgccgagcgcagaatcaccgcccgtcgccagcacttcaaacaccccgcggctcaggcgtaaaatagagatatcgaaggtaccgccgccgagatcgtaaacagcaataacgccttctttgcctgagtccagaccgtaggcaatcgccgccgccgtcggttcgttgagcaggcgcagcacatgcaggcctgccagccgcgcggcgtctttcgttccctgacgttgggcatcatcgaaataggcgggaacggtaatcaccacgccatccagctcgccggagagcgattcgctagcccgcgcggccagcgctttgagaatatcagccgatacgcgcaccggattgagcaatccagccgccgtgtcaatcatcggcagcccattaacgcttgccttaaaccggtaaggcagatgcggatagcgcgtctggatatccgccagcgagcgtcccatcatgcgtttcacagagctgatagtgttggccgtatcctgcgcggcattgtcacgcgcagcgtaaccgaccgtatggccctgctgctgatagtgaaccactgaaggcaacaggtggcgcccttcgtggtcaggcagagtttccgcctggccgctgcgaaccgtcgcaaccagagagttggtagtgcctaagtcgatgcccgccgccagacgacgctgatgcggcgcggcgctcagaccaggctcactaatttgtaataaggccatgttagattccagttaaaaatcgagcagcttttcttcgagttgttctgcgctgcttcgcagtttatcgagaaaccgcagtttgcgcaccgtatccgccgccgcgtcccacgcggcgttgtccaactgttccaccatttgctgaagacgagcatcaaacatcttttgtacgcgtttgatgaagctttccagccgcgcgtcgtcttttgattgttcgatatcgtccagctcttcgcgaagcgtgagttgttccatcagaaacgcggtgtcgcgtaccgtatgttgctcgctggccagatcgaacccgtgtaaggaaagcagatactccgcgcgcgtcaaagggtgacgcagcgtttgccaggcctggttgatcgtggcggattgctggacggcggcaagctgctgcgcctgagtgccgttggcaaatttgtcagggtgatactggcgttgcagatcctgaaaacgaaggctcagcgcctgggtgtcaatctgataacgggctggtaagccaaagagggtgaagtaatccataacattctcagggatagcctgtcagaacaaaccccacacgcaggcgaccacggtggggttataccttcttacttcgcgccgcagatgcgttgtctgcgcgggttcccccagtcatttactcaagtaagcgccaggggattcactcgcttgccgcttttctacagcacgaatgctcggtataacagcggaacacggttacacgtggaagctttcgccgcaaccacactcatctttcacattcgggttggagaatttaaacccttcgttcagaccttcttttacgaagtccagctgtgtaccgtccagaaattgcaggctcttgccgtcaaccactaccttaacgcctttgtcttcaaacacggtgtcttccgccgttggctcgtcaacaaattccagtacataagccatacctgagcagccggaggttctcacgcccagacgcagaccaaaccctttaccacggttggccaggaaggtattaactcgcgctgctgcactgtcgctaagtgtaatcgacataacaaaacctcaatgttaacgttctattttatttcgcttcgcgtttgcttttgtaatccgcaatagcggctttaatcgcgtcttccgccagaatagagcagtgaattttcaccggcggcagttccagttcgtctgcaatgtcggtgtttttaatcgcctgcgcttcgtccagggatttccctttcacccactccgttaccagagaactggaggcgatagcggaaccgcagccgtaagtcttgaagcgcgcgtcttcaatgataccttcatcgttaactttaatctgcaacttcatgacgtcgccgcaggccggcgcgccaaccatgccgcttcccacgttatcgtcgttgttgtcaaacgaccctacgttacgcgggttctcatagtgatcgattactttttcgctgtaagccattataaattctcctgattccgataccgattaatgatgtgcccattcgatgctgttcagatccacaccctgcttgtacatttcccacagtggagaaaggtcacgcagacggccaatggatttacgaaccagatcaatggtgtagtcgatctcttcttcagtggtaaaacgacctaaagagaaacggatagagctatgcgccagttcgtcattcatgcccaacgcacgcagcacgtaggacggttccagactggcggaggtgcaggcggaaccggaagagaccgccaggtctttcagcgccatgatcagcgactcgccttcaacgtagttaaagctcacgttgagaatgtttggcgcgccctgctcaaggtcgccgttcaggtaaacttcttcaatatctttgatgccgttccacagacggttacgcagaccgcgcagacgggccatttcggtctccatctcttctttcgcgatacggtaagcttcgcccatgccgacaatctggtggacaggcagagtaccagagcgcataccgcgttcgtgcccgccgccatgcatctgcgcttcaatgcgaatacgcggcttacgacgcacatacagcgcgccaatgcctttcggaccataaattttatgaccggagaaggacatcagatccactttcagttggctcagatcgataggcagtttgcccacgctctgggtggcatcaacgtggtagatgataccgcgcgcgcggcacatttcgccgatggtcgcgatatcctgcaccacgccgatttcgttgttcacgtgcatgatggaaaccagaatggtgtcgtcacgcatcgctgcttcgagctcgttgagatcgatgatgccgttgcgctgcggcgccaggtaggtcacttcaaacccttcgcgctcaagctgacggcaggtgtccagcaccgctttgtgctcggtcttgctggtgatgatgtgcttgccttttttctgataaaagttggcagcgcctttaatcgccaggttatcagactccgtcgcccctgaggtaaagacgatttcacgcgggtcggcgccgaccagttcagcaatctggttgcgggcgatatcgacggcttcttcagcctgccagccgaaacggtgtgaacgagacgccgggttcccaaaggttccgtccagggtcagaaactgcatcattttctcggcaacacgcgggtccaccggcgtggttgcggagtagtcgagataaatcggtaatttcattgctcttaaactccgtacatcactcaatgcaaggaatcaggcaaccggctggatgtacgaccgtgttgacgggacgtccgcgtcccggcctgattctgaattcttttttacgcttcatccttcagacgaccgcggcgttcaccgcatgaggccgccagaagagatggcgtaatattttaattaagcgcgtaatttaacgtcgatagcgtcctgcgcacgaccgctggcgcgcggcgcgtcatgcgtgtgctggcgaccagacacatccagaacttcctggttattcaccagctcgcctaaggtaatattgttgagaaaaccggtcaggcgatcgcttaaatcacgccacagcgcatgggtcaggcatttatcgccgccctggcagccgcctttgccctggcaacgggtcgcgtcaacggattcatcaaccgcgctgatcacttcgccgaccgcgatactgccagcatctttacccagcagataaccgccgcccggcccgcgtacgctggaaaccagaccgtttttacgtaaacgggaaaatagctgttccagataagaaagggaaatcccctgacgttcagaaatatcagccaacggtaccgggcccgcttcggagttgagcgcaacgtctaacattgcggtcacggcataacgccctttagatgtcagtctcatgtcttacttaacctcaaactcgcccctgcccggggttttttattgtaaaatgggggtattgcatagcagggacaagtctgacattcccgagtaatttggtcaactatttacttgagtaaattagtcaggtatttagcgttccgtgcgatattgacgcggttacttgcctttattctgctgctcaatagacgccagaatcccacgcagaatattcaactcctggctttccgggcgggcgcgggtaaacagacggcgcaatttattcatcacctgccccggatggttttcgcgaataaagccagtggagagcaacgtttgctccagatggccgtagaagcgttcaagatcgtccaccagcggatacggcgtctcttcatgatctgccgcgtcgccgttttcctgcgtcgccagccaggccatgcggacttcatacgcgatgacctgtaccgccatcgccagattcaacgagctgtactccgggttagcggcaatagcgacgtgataatggcatttttgcaactcatcgttagtcagcccgacacgctcacgaccaaaaaccagcgcaaccggcgtatttgccgcttccgccacgctttttaagccgcactcgcgcggatcaagcatcggccacggcaaagtgcgggaacgggcgctggtgccgaccaccaggctacagccagccaacgcttcatccagcgtatcgacgatctgcgcattaccgatcacatcgctggcgcctgccgccagggcgatggcctgggagtccggtttcaccaacgggtttaccagccacaggttagttaagcccatggttttcatagcgcgagccacagagcccatattgccggtgtgggaggtttccaccagcacaattcgaatgttttgcagcattgtctttcttcagctaaagattattctgacatcttaccataaaaccaagacagattccgatctcgctgctatactctgcgccgttttcccgttctttaacatccagtgagagagaccgatgcatccgatgctgaccatcgccgtgcgcgcagcgcgcaaggcgggtaatgtaattgccaaaaactatgaaactccggacgctgtagaagcgagccaaaaaggcagtaacgattttgtgaccaatgtagataaggccgctgaagcggtgattatcgacaccattcgcaaatcttacccgcaacacactattatcaccgaagaaagcggtgagcacgttggcacagatcaggatgttcaatgggttatcgatccgctggatggcaccaccaacttcatcaaacgtctgccacacttcgctgtttccattgctgtacgcattaaaggccgtactgaagtggctgtcgtgtacgatccgatgcgtaacgaactgttcaccgccacccgcggtcagggcgcgcaactgaacggctaccgtctgcgcggcagtaccgctcgcgatctggacggcactatcctcgctactggcttcccgttcaaagccaaacaatacgcgaccacctacattaatattatcggcaagctgttcaccgaatgcgccgatttccgccgcaccggttccgccgcgctggatctggcctatgtggctgcaggtcgtgtcgatggtttctttgaaattggccttcgtccgtgggatttcgccgcgggcgaactgctggttcgtgaagcgggcggtatcgtcagcgatttcaccggcggtcataactacatgatgaccggtaatatcgtggcggggaatccgcgcgtcgttaaagccatgctggcgaatatgcgcgacgaactgagcgatgcgctgaagcgctaagtctcttcggcggatggggccactcatccgccgtgccttttcaggcgtttttcctaaacacagcctcatcgctttacttgcctgcatgtttttgtacgatcgctccctgctccgctattggcataaagcggcaaggaagcgaacatgacccttcaacatacccgacgcatcgtcaaatccctttttattctgtttatcattgtggtctgtatttatctgctaccccgcgtagcgatcaatgccttttattacccggacaataaagtctatgggccaacccctgccgaagctgaatccattacctttaccgccaaagatggcacgcatctgcacggctggtttattcccactgctttcggcaggccggaaaacgccgtcgcgacggtgattcatgtccatggcaacgccggaaatatgtcggcgcactggccgttagtcagttggctgccagaacgcaacgtaaacctgtttatgtttgattaccgtggttttggcgaatctgagggcaccccatcacaagaggggctactggacgatacgaaaagcgcgatagattatgtgcggcatcgcgccgacgttaaccccgagcgcctggtactgctggggcagagcctgggcggcaataatgtactggccgccgtaggccactgcgtaggctgcgcaaatatgcgctacgccgaccaggcgggcatacgtgcgattatccttgactcaacgtttttatcctattcctccatcgccaaccagatgatcccgggcagcggctatttgcttgatgaccgctatagcgcggatcgcaatattgccagcgtcagccccattccggtattgattcttcatggcacggcagaccatgttattccctggcaggacagtgagaaattgtatgccctcgcccgggagcccaaacaaaaaatcttcattcctgacggcgatcacattgatgctttttccggacgttatgcaaacctttaccgtgatgcaatgattaaatttattcagaccgcgctatccgctaaatagcgcgacgctgtatatatgcatattttatgattaagaatatatttattataccgatagtaaaaaccattttttcccgttagcgaaggcggtggattagcgctagcgtaacagtaatattcaactgatttttataacaatttattttcatttgtttttcctgaatattactgtggagtatgtgatggctatcaaaattacgcctgacgagtttagtttgcttatccagcgattaaacaaaaaatggcgcgtgtttgccccgtccgcagagtttcgcggcggacgtttttccgacactgacaacattatttatcaacggattagcggctggcgcgatctcatctggcacgagaaatcgcacatgtcgccgaataccattatcgcccctatcaccgaaacgctcttttatttcgataaagacaccattcaaattgccgagacagacacttccccgataatcatctttgcccgcgcctgcgacattaacgccatgtcgcggctggattatatgtatttatcaaatgggaataattccgattacagttatcaactgctacgggagcatattcgtttcgtccttattgagtgtgaagaaagcttcgaaaattgtttctgcgtctcaatgggtaccaataaaactgactgttatagcgccgccatgcgttttagcgatgagggcgcgcttgtcagcatccgcgatccctttatcgaggcggcgatacaagggctggggcaggaggctgactataccccctctttcgtcagcgaaaaccgggaaaccgtcgtcacgccggacagcgtttgccacgatccgcaaaaaattcgcgacattctcacccaccatccgctatgggacgcctacgacagccgctgcatcagttgtggccgctgcactaccgggtgcccaacctgtacctgctatagcgtctttgacgtcgcctatgatgaaaatccgcagcgcggcgaacgccgtcgccagtgggcaagctgcatggtgccgggctttagcgacatggccggcggtcatggttttcgcgaaaaacccggcgagcgtctgcgctaccgcgccctgcataaggtcaatgactacaaagcgcgcaacggcattgaacatatgtgcgtcggctgcggccgctgcgacgatcgctgcccgcaatacatcaaattttctttgattatcaacaaaatgaccgctgccgttcggcaggcgctggcagaggaggcataacgcatgtcacattgttcctgtcatgataaaccgcagcacagtttgctgcctgcggcgtaccgcatcctcagtattactcgccacacgccgctggagtggaatttccgcgtggccgtcgattttcccgcgcactgggggcaatttgttgaggtgtcgctgccgcgcgtcggcgaagcgcccatctccgtttccgactacggcgacggctggatagatctgctgattcgtaatgtcggaaaagtgaccagcgccctctttacgctgaaagaaggcgacaacgtgtggctacgcggctgctatggcaatggctatccggtcgatacgctgcgccataagcccttactggttgtcgcaggcggtacgggcgtcgcgccggtgaaaggcttaatgcgctatttcgttgagaatccccaggaaattggtcaactggatatgattctcggctataaaaatcgcgattgcgtgctgtacaaagaagaaatggcgacgtggcgcggcaaacataatctggtactcacgctggatgaaggcgaggctgatgaccgttaccagattggccgggtgaccgatcggcttgccgacatgacgcttagcgatatcgacactatgcaggccatcgtcgttgggccgccaataatgattacctttaccgtaaaaatgctgctgcaaaaagggctcaagccggagcaaatctgggtggactacgaacgccggatggcctgctccgtcgggaagtgcggccactgccgtatgggcgaagtgtatgtctgcaccgacggtccgatatttaactacgccgtcgcgcaacgttttgccgattaaggagaacatcatgagcattgatattgatatcattaaagcccgtgcgaaaaacgaatatcgcctgtcaaaagtgcgcggcgaagccatgatcagcgtccgcattcccggcggtattttgcccgcgcatttgctaacggtggcgcgtgacatcgccgaaacctggggcaacggacaaattcacctcactacccgccagaagctggcgatgccgggtatccgttacgaagatatcgacaacgtgaacgctgcgctggagccgtttcttcgcgagattgaaatagaactgtgcgacgtccaggttgaggataccaaagcgggctatctcgctattggcgggcgaaatattgtcgcctgtcaggggaaccgcatttgccagaaagccaacactgacacgaccggtctgtcccgtcgtcttgaaaaactggtctatcccagcccttatcatctcaaaacggtcatcgtcggctgcccgaatgattgcgcgaaggcgtcaatggccgatctggggattattggcgtggcgaaaatgcgcttcactgccgatcgctgtatcggttgcggcgcctgcgtgaaggcctgtagtcaccacgcggtaggctgcctggcgctgaagaacggcaaagcggtcaaagaagagtccgcctgtatcggctgcggcgagtgcgtgctggcctgtccgacgctggcctggcaacgtaagccggatcagctctggcaagtccgtctgggcggacgcaccagtaaaaagacgccgcgcgtcggcaagctcttcctcaactgggtgactgaagatgtgataaagcaggtgatcgttaacctgtatgaatttgaaaaagagatgctcggcggaaaaccgatctatctacatatgggccatctgatcgacaaaggcggctacctgcgttttaaagaacgggtactgcgcggcgttcagctcaatccggaagcgatggtcgccgaacgcatttactgggccgaagacgaatccgtcgcgcggatgcatctcaaacccgccgggcactaatcaaccacgccatggccgcagcccgcccacaggctgcggcacgctaaaccacatgaccagcgccgcgacaagcagtatgccccctccagccagcgccagcgttgaccagcctacctgccgccataacgccggcgctttgtttccactgagtttcaccgccagagcacgaaaagtgtgtaccagcaacgccagcgaggtaatcgttagcgaggttcccgccgccatcgccagtaccgacgccattccccagctaaaaacgccaatcactttactgaataacagcaccattatcgcgccggaacagggccgcatccccatagacagtacgatcatgaatcgcgcgcgccagtcatcgccgctatgcaattgttcctgcgtcggtagatgctgatgtccgcagccgcatttttcatggtgaacatggcgcggcgtaaaagcgataaagacaggtttacgtagcagcgcgcgtaacctttttatggcccgccagcacagcaaaatgcccagcccgccaactaacgcatagctccccttttccagccagaagccgctcagatggagctgcctggccggaagttgcaatacggtcagcacgcccaccaccaacccgatagccacgagcccctgtaataacgcggcggcgagggttaacacgatactcgatttcaacttcgaaggatgcgtcgccagccatgtcgcgatcaccactttgccgtgtcccggccccagcgcatgaagcacgccatacataaaactcagcagaagcaacgatccgcccgcccgctcaggatgcgtcgccaccgcgttaagcagcgcgctcaactgctgattcacgtcccgctgccaaagagcgcttttcaacatcacctgcggccaggcctgccacatccacagaccgccaaccagcatcagcagcaggaataacgccaatggccacagcgagagccagcgccgccccggagtgcgttgagaaaaaattactgacattgcaaggtcaccgtttgggcaaactgtttacctaaatccatatcctccggcggcgcgtcctctttatccagcgactgggcgaaacgtagcgtctcttcgccgggcgcaggagtataaacctgaatccgacacttttcgcgcagcggttccggcatcgtgatatcgctgtcctggtcataatgcatatcgacataataagagggatcaaacgttgaaaaggtataagtctgtccgcttaacggctgcggttcagccagcggtagcgtaaaggtcaataccgcctgatgcgcgtcacgcgtcataccgtattctgtcggcctgtttttaaacttcactttcgcgccattgcgccacacttctgtaaagtagtgctgcccaagtacgttagccatcacttccgccgccaactttttccatatttctgaccccggtgccgcgtttccggcgtcatacagcagatctgcggacgtcagcgcgtccattgtccagcgcatttttaacgccacaaattgctcattttcactgaccacctgcgtttgcagacggatgaagctgtgcggatgcgccgccgccacgaaagataaaacggcaagaaatagtgttaaggcgctgcgtttcactggcttcatctgttcctcgcgataaaaattctgtgacactcctcagcattcctggcctaaaagcacgcttatcacatttttcacacgcaaactttagctatccttaccagacaaactaacgggagacctgacagatgatgccgacaattgccccaccatctgtactttccgctccccagcgccgctgtcaggtattgctgacgcttttccagccggagccaattgccacggtggaaatcttcagcgcgcttaatggcgttgatgatgatactgcccgtgaggatatcactgagacaagcctggagatccagcgctatcatcgccttgccatcacaacatgccagaacggttgctatcggatcgaaggtacagcactcgatcagcgcctttgccttttacactggctcaggcgcggcctgcgtttatgcccgaccttcgtcacgcaacagtttaccccggccttaaaaaacgcgctaaagcagcgcggtatcgcgcgtccgctgtatgacgatattaatctgcacgcgctcatcaatctgtgcgcccgccggttgcaaaaaccatttgaacatcgcgacgtgcagttcctgcgtctctttttacagtattgtctgctacaacaccatgccggcatcaccccggaattcaaccctgtgcagcagatttgggcgcagtcgtgcgcggaatatccactcgcccaggaaattggtcgtcactggcagcgccacgtgatgcaggccgcaccgctcaatgaagcgctgtttatggcgttactgttttcaatgattcgcctccccgacccgattcgcgacacgcatcaacgggcgcagcaactgcgactggaggtggcgcggctggtgctgcgctttcgagaaaaagggaacgtacgcttcagcgacgaacaagggcttaacgatcagctgtatgtccatctcgcccaggcgctgaaccgaagtttattcacgattggcatcgataatacgcttccggaagagtttaaccgtctttatccgcgtctggttcgcaccacacgtgaggcgctcgccggatttgaagccgaatatggtatccacttttccgaggaagagacggggctggtggcagtgattttcggcgcctggctaatgcaggataacgatttgcatgagagacagatcgtattgttagcggataaaaatgatgcgctggagacgcatattgagcagcaactgcgtgaactgaccctgttgccgctgaatatcagacggatatcgctccaggcgtttcaaaaagagggatgcccgcgcggcgtagcgctgattgttaccccttacgccacgccgctaccgctcttctcaccgccgttaattcatgcggatcgcgccctcacagagcaccaacagcagcagatccgcaagatcctggaatcatgacgcggcaaccactttgggccgaaggaagatagcgggcaatgccaccagcgccataatccagaatacgccgccgcccagatgttgatacagaaaaccggcaaataccgtcataatcgcgatactgccgcccatcgccacagcggaatagacggcctgcaaacgaatcacctcgcttccctgacgcgcagcgatatagcgcatggcggccagatggcaaacggtaaacgtgccacagtgcaggatttgtatcacaatcagccacggcaacgccgtactccagcccatcagtccccagcgtaccacgccgcacacagcggaaagcaacagcaagtcgcgggcgctaaaccggcggaatagctttttactcagggcgaaaatgatcacttccgccaccacgcccaacgaccataaatagccgaccgccgatgctgaatagccagccccctgccagtagatggcgctaaaaccgtagtaggcggcgtgcgccccttgcagcaaacagacgcaggcgagaaaacgccaactttgtgccaccagcgtacgccaggcgggccagcctgcgctctcctgctgacggctttccccttgcggcggcacgctgggacgtaacaacatacccagcaacatcgaggcgacgccgagcgtcagtagcgccagaatcgcctggtaatcgtataaactcaccagcttaccggtcagcgccgaccctatcacgaaggcgatggacccccacagccgcacccgaccatagtccagggtaatttgcttttgccaggtattggccagcgcatcggtcagcggcaccagtggcgaaaagaagaggttaaacccaaccatcaccaccattagccacgcgacatgcgttcctgcccaaaatgccagcgcaaataccagcgtcagcaatgccaggacgcgcagcgcggagatcaaccgcgaaggatcgcttacgcgaggcgcaatgagcagactaccgagaaaacgcgcgaccagacccacgcccagcagaagaccgatggtttccggcgttagcccaagacctttgagccagacgctccagaagggcagaaaaataccgtaactaaagaagtaggtgaaataactgagcgccagccagcgcgtggaatgcaatgccatgattccctcccgtttggaggcgatagtctggcggtaaacggttgcgctggcaagggtaacataaggttaacaggcggagggagaagttcaaacggcaacgccgccggataatgacttccggcggcgtcacgttatggcgcataagtaatgcccgacagacgcagcgccatcgggccattttcacaacacaagcgcttatgcgtaaaccgggaagcgtgcgcagatatccagcactttcgctttcacgcgttcaatggtggcttcatcattgatgttgtccagcacgtcacacatccagccagccagctctttcacttccgcttctttgaagccgcgacgagtaaccgccggagaaccaatacggataccggaggtcacgaacgggctcttaggatcgttcggcacgctgtttttgttcacggtgatgttagcacggcccagcgcggcgtcagcttctttaccggtcaggtttttatccaccaggtccagcaggaacaggtggttctcagtgccgccagacaccactttgtagccgcggttcaggaacacttccaccatcgctttggcgtttttcgccacctgctgctggtaaactttgaactccggctccatcgcttctttcagcgctaccgctttaccggcgatcacgtgcatcagcgggccgccctgcgcgcttgggaagacggcggagttcagttttttatacagctcttcatcgccgcccttcgccaggatcaggccgccgcgcggacccgccagggttttgtgggtggtggtggtgacaacgtgagcgtgcggaaccgggttcgggtaaacgcctgcggcaatcaggcccgccacgtgcgccatgtcgacaaacaggtatgcgccgatgctgtcagcgatttcacgcatttttgcccagtcaaccacgccggagtaggcagagaagccaccgataatcatcttcggcttgtgctctttggccagcttcgccatctcgtcatagtcaattttaccggactcatcgataccgtaaggtacgatgttgtacagtttaccggagaagttaaccggggagccgtgagtcaggtggccgccctgcgccaggttcatacccagaacggtatcgcccggctgcagcagcgcggtgtaaacagcgaagttagcctgagaaccggagtgcggctgcacgttagcgtagtcggcgccgaacagttctttcgcgcggtcgatagccagttgctctacgacatcaacgtattcgcaaccgccgtagtagcgcttgcccggataaccttcagcgtatttgttggtcagctgagacccctgcgcctgcatcacgcgcgggctggtgtagttttcggaggcgatcagttcgatgtgctcttcctgacgtactttttcctgctccatagcctgccacaattcggcatcataatcggcaatgttcatttcacgctttaacatccgcatctcctgactcagctaacaataaaatttgtgcctgaaaaggcagtccgtgggacttcggccaacagtataaccgaatcattcttcgataacaggtcttgacaaaggtttttacgcaaacgattacctatgcgtcagataagggtttcctgaacgagagtctgacgaatttcaacggatttcttttcagctttgtgatgcagatttttcacgttgttacctccataacgtaaagcagagaagatccatttacaatgcaagggtatttttataagatgcatttgatatacatcattagattttcacataaaggaagcacgtatgcttgacgcacaaaccatcgctacagtaaaggccaccattcccctgctggttgaaacaggaccgaaactgaccgcccacttctacgaccgtatgtttacgcataacccggagctcaaagaaatcttcaatatgagcaaccagcgtaacggcgatcagcgtgaagccctgtttaatgctatcgcggcctacgccagcaatatcgaaaatttaccggcgttgctgccggcggtagaaaaaatcgcgcagaagcacaccagcttccagattaagccggagcagtacaacatcgtcgggacacatctgctggcgacgctggacgaaatgttcaacccgggccaggaagtgctggacgcgtggggcaaagcctatggcgtactggctaacgtctttattcatcgggaagccgagatttatcacgagaacgccagcaaagacggcggctgggaaggcacgcgccccttccgcatcgttgcgaaaaccccgcgtagcgcactgatcaccagctttgagtttgaaccagtcgacggcggtacggtggcggaataccgtcccgggcagtatctgggcgtctggctgaagccggaaggttttgcgcatcaggagatccgccaatattcactgacccgtaaacccgatggcaaagggtaccgtattgccgtgaagcgtgaagacggcggccaggtatcaaactggttacaccatcacgccagcgtaggcgatgtggtgcatctggctgcgccggcaggtgacttctttatgaatgtcgccgctgatacccccgtttcgctgatttccgctggcgtcggccagacgccgatgttagcgatgctcgatacgctggcgaaagaacagcataccgcgcaggtgaactggttccacgcggcggagaacggcgacgtccatgcgtttgccgacgaagtgagcgagctgggccgtacactgccgcgtttcactgcccatacctggtaccgcgagccgactgaggccgatcgcgcccaacgcctcttcgacagcgaagggctgatggatttaagcaaactggaagccgcgatcagcgatccagcaatgcagttctatctttgcggcccggtaggctttatgcagtttgccgcaaaacaactggtttcacttggcgtgaataacgaaaacattcattacgaatgcttcggcccgcataaagtgctgtaattgcaacaaatcctctgaaaaaacgggcgttatcgttaaggcgaacgcccgttttcctccccgttcccctgcttattgcgctgctttttatgcctttcttttacaaaaaaggggaataaaaaaagtctgtgcaaatcgtgttattattaacgtttgacttagctcgttagggcatctttttatgcagcaacctgttgtacgcattggagagtggctggttacaccttctgttaatcagatcagtcgtcagggacgccagattactcttgaaccacggctgatcgatcttctgatgtattttgcgcatcacccggatgaagtgttaagccgggataacattattgatcatgtctggatgcgcaccatcgtgaccaaccatgttgtcacccaaagcatttctgaactacgcaaatcattaagagatggcggagacagcaatgctgaatacatcgttaccgtacctaaacgcggctataagctgacggcgccggttatctggtgcgaagaaaatagcgatgagatcgataattcatcaacgtcgccgccgccgccgatcgcagcgacgaatgcagaaccgacggagggggttactgccgctacgcctgtgccgcccgcctctttgcaaacgccgactaaaaaggcgaaaaagccgcgtattgccgctttctggacgtgggtgatgttcctgctctcgctggcgacgctggtggtgtttatcgtgatgtcggtggtagatcataatgccgcggtaacaaaaacgcggttattacttaacccacgagatatagatgttcgttttgaaggcggcaattcctgtaataactgggtctcgcaggagtcctacgccatcggtctgggcggcttaatcaccgacctgctgaacacctactcgacttttatggtgcacgataaaaccaattaccgggtcaatgagccaagcagctccggtaagacgttaaccattcagtttgtcaatcagcgccactatcgggcgcagcagtgctttatgtctgtagtgctcattgataacgccgatggttcaaccatgctggataagcgttatttcgtcaccaatactaaccagttgtccatccaggatgatctgtttaatagcctgtctttcgttttaacacagccctggcctaatcgtatgcgagaacaactggccctgttcagaacgccgcaaaataccgcactgatgcgtttttatgaggcgcgccagcttattctgagcggcgatgcgcaggcgctaggtaaagccagcgatattctgaatggcattattaaggaaacgcctgatttcaactatgcctatgaatataaagtgctggtagatgtattacggcaatcacagcagccgtttgataaagaacaagtggccgcactgaacgaagagtttaaaaaaatagatcaaattccgggcgttgagaaaacgtctgtttattataaaatcaagaccgtcgatctgttaggcaaaggtgatatcgatgcagcgtatgaggaaatcaataaaagcatcgagcttgaaatgtcgtggtttaactatgtcctgttggggaaagtttacgaaatgaaaggtgagaatcgtctggccgctgatgcctatctgaccgcctttaatttacgtccaggtgaaaacactctgtactggatcgagaacggcgtatttcagacatccgttcagaaaattgtcccttatctgaatagttttctggcagaagattaaatttaacgctgaaccatgacaaataaaagcgaaaagatattaaatttttcgcttttattttgtgaaaaacatgttgccaaaaatagcttatgttaattttggcaacatattcattgcaaagatatgtaaatataactctttgtaattaaacgatgtttatcctttcatgatattttccatgatatttatatgttaattcaaaaaaatcaatctatcagttttttcatgtttgtgtttatttcactttttctttaggacttatctcaacccattcgttaatcttgtcgacagttgaacgggcacgcagcatatatgaagcataagcccggttcttaaaaatacagctcaggagaaatgaacatgagttctgtcaaaaagatcgggctatttgcctgtactggcgtcgttgccggtaatatgatggggagcgggattgcattattacccgccaaccttgccagtattggtggcattgccatctggggctgggtaatttctattattggggcaatgtcgctggcttatgtttatgcgaggctggcaaccaaaaaccctcaacagggtggccctatcgcttatgctggggaaatatctccggcgtttggtttccagaccggcgttctttattatcacgcaaactggattggtaacttagccatcggtattaccgcggtttcttatctttctacgttcttcccggcattaaataatccaataccggcaggtattgcctgtattgctatcgtctggctgttcacctttattaatatgctgggtggggcctgggtcagccgcttgacaacgattggcctattcctggtgctgatcccggtagtcttgaccgcagtcgccggctggcattggttcgatatcgcgacctatcacgcgaactggaacacgtccacgacgaccgactctcacgccattgttaaaagtattctgctctgcctgtgggcgttcgttggcgttgagtctgccgccgtcagcaccggcatggtgaaaaacccgaaacgcaccgtaccgctggcaaccatgctgggtaccgcgctggcaggcatcatctatatcgctgcgactcaggttatcgccgggatgttcccagcttccgttatggcctcttccggcgcgccgttcgctatcagtacctccacgattctgggtggctgggctgcgccgctggtttccgcctttaccgctttcgcctgcctgacgtctctgggctcctggatgatgctggtcggccaggctggggttcgcgccgccaacgacggcaacttcccgaaaatttacggtgaaatggataaaaacggtattccgaaaaaaggtctgctgttggctgcggtgaaaatgacggcgctgatgattctgatcaccatcatgaactccagcggcggtaaagcgtccgacctgttcggcgaactgaccgggattgccgtactgcttaccatgctgccgtacttctactcctgtgttgacctgattcgcttcgaagggttcaacatccgtaactcggtaagcctgatttgttctgtactgggctgcgcattttgcttcatcgcactgatgggcgccagctccttcgaactctccggcacctttatcgtcagtctgatcatcctgatgttctacggtcgcaaaatgcaccagcgccagaacaacgacagcgacaacaatacggctgaagcgctttaaccgctaactcctttttctcaaagcccctttcgtcacctgctatagcgtagcgggaggggcccactttaccaggaacaagactatgaacgttattgctatcatgaaccacatgggcgtctactttaaagaagagcctattcgtgaactgcatcgtgcactggaaggtttaaatttccgtatcgtctatccaaacgaccgagaagacctgctgaagctgattgaaaataactcccgcctttgcggcgtcattttcgactgggataaatataaccttgagctttgcgaagagattagcaagctgaacgagtatatgccgctgtacgccttcgccaacagctactctacgctggacgtcagcctcaacgatctgagaatgcaggttcgcttctttgaatatgctttaggcgccgcagccgatatcgcggcgaaaattcgccagaataccgatgaatacatcgacaatattctgccgccgctgacaaaagcgctgttcaaatatgtgcgcgaagggaaatatactttctgtacgcctggccacatgggcgggaccgctttccagaaaagccccgtcggcagcatcttttatgatttcttcggcccgaacacgatgaaatccgatatttcgatttccgtttctgaactgggttcgctgctggaccactccggcccgcataaagaagcggaagagtatatcgcccgcgtctttaacgccgaacgtagctacatggtgacgaacggcacctctacggcgaacaaaatcgtcggtatgtactccgcgccggcaggcagcacggtactgattgaccgtaactgccataaatcgctgacccatctgatgatgatgagcgacattacgccgatttatttccgcccaacccgtaacgcctacggtattcttggcggtattccgcaaagcgagttccagcacgccactatcgctaaacgggtaaaagagacgcctaacgcaacctggccggtccatgctgttattactaactcaacctatgacggtctgttgtataacactgactacatcaagaaaactctggatgtgaagtccattcattttgactccgcctgggtgccttataccaatttctcccctatttatcagggtaaatgcggtatgagcggcgaccgtgtggaaggcaaaatcatttatgaaacccagtccacgcataaactgctggcggcgttttcacaggcatccatgattcatgttaaaggcgacattaacgaagaaacctttaacgaagcctacatgatgcataccaccacttctccgcactacggtatcgtagcgtctactgaaaccgcagcggcgatgatgaaaggtaatgcgggtaaacgcctgattaacggctctattgaacgtgcgattaaattccgtaaagaaattaaacgcctgaaaagcgaatctgacggctggttctttgacgtatggcagccggaacatatcgatggagctgagtgctggccgctgcgttcagatagcgcatggcatggcttcaaaaatatcgataacgaacacatgtacctcgacccgatcaaagtcactatcctgacgccggggatgaagaaagacggtacgatggatgagttcggtattccggcaagtctggtcgccaaatatctcgatgaacgcggcatcatcgtagaaaaaaccggtccatacaacctgctgttcctgttcagcattggtatcgacaaaaccaaagctctgagcctgctgcgcgcgctcactgaatttaaacgcgcctttgacctgaacctgcgcgtcaaaaacattctgccggcactgtaccgcgaagcgcctgagttttatgaaaatatgcgcatccaggaactggcgcagaatattcataaactggtcgaacatcataatctgccggacttaatgtaccgtgcgtttgaagtgctgccgaaaatggtgatgacgccgtatactgcgttccagaaagagctgcatggcgaaacggaagaggtgtatcttgaagagatggttggacgcgtcaacgccaacatgatccttccttaccctccgggagtgccgctggtgatgcctggtgaaatgatcaccgaggaaagccgtccggtactggaattcctgcaaatgctgtgcgaaatcggcgcccactatccgggcttcgaaaccgatatccacggcgcctatcgtcaggcagacggacgttacaccgttaaggtgctgaaagaaaatacgaaataagtaccaaagggaagtggcttgccacttcccttttttcacgcagcaaggagactttatgaaaacaccctcacaaccgcgcgcgattttttacatcgtggcgattcaaatttgggaatacttcagcttttacggcatgcgtgccttactcatcctttatcttacccaccagcttggttttaatgacagccacgcgatcaacctcttcagcgcctacgcctctttagtttacgttacccctattcttggcggctggcttgccgaccgcctgcttggcaaccgcgtggcggttatcaccggcgccctgttgatgacgctgggtcatgtggtattgggcttagaatctgattcaacgttgagtttatatgcggcgctggccattattatctgcggctacggcttgtttaaatccaatattagctgtctgctgggcgaactttacgcccctgatgacaaccgccgcgacgggggattctcgctgctctacgccgccgggaatattggatcgatagccgcgccgatcgcctgtggtctggcggcgcagtggtatggctggcatgtcggctttgcgctggcgggcgtgggaatgttcatcggcctgctcatctttttaagcggtcatcgccactttcagcagacgcgcggtgttaatcgccccgcgctgcgggcggttaaattcgcccttccaacctggggttggctggtattaatgctgtgtatcgcaccggtattcttcaccctcctgctggaaaataactggtctggctatgtgctggccattgtctgcgtcttcgcggcgcaacttatcgcccgtattatggttaaatttcccgaacaccgtcgcgccttgtggcaaatcgttctgttaatgatcaccggcactctcttctgggttctggcgcagcagggcggaagttcgatcagtttattcatcgaccgttttgtcaaccgccactggctaaacatgaccgtccccaccgcattgttccagtcggtcaatgcgattgcggtgatggcggcgggcgtggtgctggcgtggctgagcagcccgaaagagagcgcccgctcggtgctgcgcgtctggcttaaatttgccgtggggctggtattgatgggcggcggttttatgctgctggcgctaaacgcgcatcaggcccggttagacgggcaggcatcaatgggaatgatgatcgcagggctggcgctgatgggctttgcggaactgtttattgatccggtcgcgatggcgcaaattacccgcctcaacctgcctggcgtcacgggcgtactgaccggtatttatatgctggcgaccggcgcggtcgctaactggctggctggcgtggtcgcgcaacaaaccacggaatcgcaaattagtgatacggcggtagccgcctacggacactttttctcgcaaatgggcgagtggacgctaagttgcgtggcgctgatcgtcgccattgtcggcctgagatgggtttgcacccggactacatcggcgctaccgcagggcgattaaacggtggttcgctgcccacaaggaggagacgggcagcgaatcggcacatcagatagccgcgtcgtcttcttcgccagtacggatacgaataacgcgggcgacatcaaagacaaagatcttaccgtcgccgattttccccgtctgcgcggtacgaatgatggtatcaacacaggtatccacgatgtcgtcaggcacaacgatttcaatttttaccttcggcagaaaatccaccatatattccgcgccgcgatacagctcggtgtggcctttttgacggccaaaacctttgacttcagtgaccgtcatgccggtaatacctacctcggccagcgcttcacggacatcgtccagcttgaagggtttaataatcgcatcaatctttttcatgctattccttgaaaaggtcgcctgtgttttgatcggttaaacgtaacatatttcgcgctactttacggcatgaaaactactctttgaaatcattcgcatccagttcgtgacgggagagtagcttatagaattccgtgcggttgcgccccgccatccttgccgcgtgcgtcacgttacctttggtaatttgcagtaacttgcgcagatagttcagttcaaattggtttcgcgcttcggcaaaagttggcagcgcggtgttttcgccttccagcgcctgctcgaccaacgcatcgctgatcaccggcgaagaagttaacgccacgcattgttcaatgacgttgaccagttggcgcacgttgcccggccagcttgccgtcatcagccgtttcattgcatcagtagaaaaggcgcgaacaaacggtttatgccgctgtgccgactgtctgagcagatgattagccagcagcggaatatcctcggtacgctccgccagcgccggaattttcaggctcacgacattcagccggtagtacaaatcttcacgaaattcgccccgcgccatcgccttcggcagatcgcggtgcgtcgcggaaataattcgcacgtcgatatcaatatcgcgattgctgcccagcggcctgactttgcgctcctgtaacacccgcagcagcttcacctgtaacggcgcgggcatatcgccaatttcatccagaaacagcgtgccgccttccgccgcctggaacaacccttcacgattgctcactgcgccggtaaaggcgccgcgcgcatggccgaataattcggactccagcaactgttccggtaacgcgccgcagttaatggcgacaaacggcttgttactgcgcgggctggcattatgaatcgcctgtgcgaaaatctctttcccggtgccgctttgtccgttaatcaatacgctgacatccgactgcgcgaccatgcgcgcctgttcaagcagtcgcagcatcagcgggctacgggtaacgatagcgttgcgccagctatcgtccgtcgcgggagcggactgctccagcgcttcatctatcgctttatataacgcgtctctgtcgatcggcttcgtcaaaaagctgaatacgcctttctgggtagcggccaccgcatccggaatagaaccatgcgccgtcagaatgataaccggcattcccggctgtactttctgaatttctgtgaacagttgcataccatccatttcgtccatgcgcaggtcgcttattaccagatccactttttcccgatgtagtacccgtagtccttcctggccgctctctgcggtcacgacgctgtatccttcactggtcaggcgcataccgagcaatttcagtaatccgggatcgtcatcgaccagcagcaggtgcgccggtttacggcttatcatggcgttacctcatcttgtgacggcgacggcgccgcgccatcttcagacgtcgcgggtttgtcattcgtatgcggcgtatcggcgttgtaattccctgccggttttcgtgtcgaaagctggcgctcaatatcggttaaactctccagcttacgggtggtaagatcgagctgcgtttgcaaggcctgttgctgctggcgcagcgcatccagctcactatctgacatttgctggagtttgctataacgctgacgttcggcagaaagcgccagttgcagcgcctgaccgtcatgccagatttggtagacgggccgtacctgagccggtatttgcgcgcttaacgcctccagacgggtcactatggcgcgccgctccggcggcgtaatttttgcatccgccagtaaaatcccgcgcctgaaggcattttgccagttatcatccgtcaacgcgcgcgcctctgcgcgcgactgaaccggcatcagacgatcggcgcagtcaatcgtgcgtagccagtacagcggattcgtctccaccgcctgcccgcgtagcgaccagatatccgcgcacgccgtcgggagataatccgccagttgataatgggggagcgtgtcctgcgctgcgctaccgggcagttgctgtgaagcatggggaacacatgcggtcagcgccagacacgatatgcccaccggtattccccaccgcaaaaggcatcgtttaatagtttggacgaaaacgtgtgacatacgcaccaggcttaaattcatattagtgtttgtcagatgcaggcaatggcagcgagatgcgaaaacaaacttcctgcgcgttgtcatccaccagttggatctctccctgcattcgacgaatacaatctctggcgatactcagccctaacccactgccttttaccgccccttttcgctggtggcttccctggaaaaaaggctcaaaaatcatttctctttcggtttgcggaatcggctcgccgctattaaccacatcgatataaaccgtggagccctgagagcgactacggatacaaatgttaccggattcagcgccatagtgcaccgcgttggaatagagattatccagcacgctcatcagcaacatgggctctgctatgcagcgttcggcctccaggtcgacatcggtatgcatcattttagcgcgggcaggcaaactgtgggcggaaaccaccatatccacaagcggcgcgatatcgaccgcttccagctctgtggcactgtctaccagtttccggttgtaatcaagcaattgctcaatcaatttttgtaaattacgactgctgtcatccagaatatcgaccacctctttttgctccggcgtcagcggcccaaccacctgatcggccagcagctcagtcccctcgcgcatactggccagcggggttttcagctcatgggacaggtgacgtagaaactgatggcgctgggattccagccacgccagacgctcactcagccagataatgcgctgccccaccgatcgtaattcacgcggaccggtaaaggtgacggtattccccaaagaacggccttcgcccaggcgattaatcatccgttcaattcctttcaccggcccgataatcatgcgggtaaaaagtagcaccatcgccaggctcaccagaaatagcaccagcgcctgccagccgaaaaattgtccgcgctcggcgatttcttgttgtaactgctgcccgcgcgagtaaaccacggtacgcgtcgcctgcaccatttccgtattcgcgttggcaaaggcctccaggcgcgcggccgctgccgcttccgggccgctatctttacactgcaattgcgccagcgcgtttaaatcctggcgtaacgcctgatacaacttatcatccggcaagacgccggcatgggcgtccagcatatcgctatagcgcttacgctggctttgatacacttttgccagcgtcggatcgtcaagcacgcaatactgtcggtagcttcgctccatctccagcgcgacgttggtcatcgcctcgctgcgccgggcgtcaataagcgtgctgcggttagtcaccgcagcctgatcgcttaacgcgttaaggctttgccacgcctgccaggccagaaccagcaacggcagcaggatcagcaaaaaggccagcatgaccaattgtcgtaaagaacgggggaaaacagaccagcgcttcaacgtgtcgctcacataaaagaagaataaaaaagatgctaaccgagggaagcgccagatacaacaaagccgggctaaacccggctttgttatggaataaggcggtgcctaactcgacgtttcgcccggaggttgataaagctacgctgttatcagaagttggacggcaggcaccttgttgtgcgtcattcgaagtttatgtagcgcgtccctaaggggctgacataagaaggtgaatgagccactggttaccattatgcagtaattgtgccaacattcaaaagaatttgttaacataatgatagatatgaaaaatatcgttattcatgctaaaaatggctctgtctgttttttgccctttctgtcgccaatcagcaacacctgcaacacctaaaaataaaacaatttaaaatcaaatagttaaatgtctctttttggcgacaacctatcccccactcatgtcgggatttcccgacactttaatcttgcggcataagcgctagtttattgccggatggcggcgtaaacgccttatccggcctaccgcttgacgttcaagacggtagctacaaccgcgcttccccgtgggcctgataagcgccgtctacaaaaaagcccctcgtgaagaggggcttaatggctatcgggctaattaaccaagctgcttacgcgcattacggaagatacgcatccacgggctatcctcgccccagttttccgggtgccaggagttggcgacggtgcggaatacgcgttccggatgcggcatcataatcgtcacccgaccgttttcggtcgtcaccgccgtgatgccgttcggcgaaccgttcgggttagccggataggtttcggtcaccttaccaaagttatcaacgtagcgcagagcgaccaggcctttgctctcaagcgcggcaagatgcgcatcgtcacgcacctcaacgcgcccttccccatgggaaaccgcaatcggcatctgtgagcctaccattccttgcagcagcagcgatgggctttgcgtcacttctaccaggctgaagcgggcttcgaagcggtcagaatggttacgtacaaaacgcggccacagttcgctgcccgggatcagctcgcgcagattcgacatcatctggcaaccgttgcacacgcccagcgccagcgtctgcggacgatggaagaaggtttcgaattcgtcgcgcacccgatggttaaacagaatggatttcgcccagccttcgcccgcccccagcacgtcgccgtaggaaaagccgccgcaagccaccagcgcatggaagttacccagaccgatacgaccgcccagcaggtcgctcatatggacgtcaatcgcgtcaaagcccgcacgatggaacgccgccgccatctccacgtgagagttcaccccctgctcgcgcagtacagcgactttcggtcgtgcgcctgtcgcaatgtacggcgcggcgatatcttcattaatatcaaacgacagcttcacgttgaggcccggatcggtatcattcgctttcgcctcgtgttcctggtcggcacattgcggattgtcgcgcagacgctgcatctgccaggtggtttccgcccaccagacacgcagtgtagtgcggctttcgctgaataccgtctggtcattagcggtaatcacaaagcgatcgccagccagggcctgaccaaggtagtggacgcagtcagcaaggccgtactgcgccaatagcgcttcgaccgcgtctctgtcttcagcgcgtacctgaatcacgccgcccagctcctcgttgaacagtgcggccagatggtcatcgcccagcgcggcaatatcgacctgcacgccgcagtggccggcaaaggccatctcggccagcgtcaccagcagaccgccgtcggaacggtcgtgccaggccagtaatttacgcgcagcgaccagcgcctgcatggcgtcatagaagcctttcagttgcgcgacgtcacgcacgtccgcgggtttgtcgccaagctgacgatagacctgcgccaacgccgttgcgcccagcgcgttgtggcccttgccgagatcgatcagcagcaaggcgttatcttccgttgaaagctgcggcgtaagggtgtgacgcacgtcttccacgcgggcaaacgcggaaatcaccagcgacagcggcgaggtcatttcgcgctgttcgttgccttcctgccagcgggttttcatcgacatcgaatctttgcccaccggaatagtcaggccaagctgcggacagagttcctctcccaccgctttaaccgcgtcatataaaccggcatcttcgccaggatgaccggctgccgccatccagttagcggaaagcttaatgcgcttgatatcgccaatctgcgtcgcggcaatgttagtcaacgcttcaccgacggccagacgggcggaggcggcaaagtccagcagcgccaccggcgcgcgctcgccaatcgacatcgcttcgccgtagtagctgtcgaggctggcggtagtgaccgcgcagtcagccaccgggacctgccacgggccaaccatctggtcacgcgccaccataccggtgacggtacggtcgccaatagtgacaaggaaggttttttccgccacggtcggcagatgcagaacacgctttaccgcgtcggcaatcgtgatatccgcgcggttcagcgcatcgcctttcgccttcaatgtttgcacatcgcgggtcattttcggcgttttgcccagcaggacatccagcggcaggtcgatcggctgattgtcgaaatggttatcatgcaacgagagatgctgttcttcggtagcgtcgccaatgaccgcatacggcgcgcgttcgcgcttacacagttcatcgaacagcggcaactggtcagccgcgaccgccagcacatagcgctcctgggattcgttacaccagatttccagcgggctcatgcccggctcgtcgctaagaatgtcgcgcagttcgaatttcccgccgcgcccgccgtcgctcaccagctccggcatggcgttggagagaccgcccgcgcccacatcatggataaacaagattgggttagcgtcgcccaactgccagcagcggtcgatcacttcctggcagcggcgttccatttccgggttgtcgcgctgaacagaggcaaaatcgagatccgcatcagactggccggaagccattgacgatgccgcgccgccgccgaggccgatattcatcgccgggccgccaaggacgatcagcttcgcgcccacgacgatctcgcctttctgcacgtgatcggcgcgaatattaccgatcccgcccgccagcatgatcggcttatggtagccgcgcagctcttcgccgttgtggctgttcactttctcttcataagtacggaagtaaccggtcagcgccgggcgaccaaattcgttgttaaacgccgcgccgcccagcggaccttcggtcatgatatccagcgcggtgacaatacgttccggcttgccaaaatcctcttcccacggctgttcaaagcccggaatacgcaggttggaaacggagaagcccaccagcccggcttttggtttcgcgccacgcccggtggcgccttcatcacgaatttcgccgccggaaccggtcgccgcccccggccacggagagatggcggttgggtggttatgcgtttcgaccttcatcagaatgtgcgcgggctcctgatgaaaatcgtaacggccggtattgtggtcggcgaagtagcgccccaccgcagatccttccatcaccgcggcattgtctttataggcagagagcacatagtccggcgtggtttcgaaggtgtttttaatcattttaaacagcgacttcggctgcggtttaccgtcgataatccagtcggcgttaaaaatcttgtggcggcagtgctcggagttcgcctgggcgaacatgtacagttcgatatcgttcgggttgcgccccagtttggtaaacgcctcctgcaaatagtcgatttcatcttccgccagcgccagaccaagacgcaggttggcgtcaattaacgcctgacggccttctcccagcagatcgacactggaaaccggcgcaggctgatggtggataaacagtttttccgcatcggttaaagaagagaacaccgtctccatcatacggtcgtgcagctctgcggccacttgtcgccactgttccgccgtcaacgtcgaagcctcgatatagtacgctacgccgcgctccagacgatcaacctgttgcaggccgcagttgtgggcgatatccgttgcttttgaagaccagggggagatggtaccaggacgcggtgtgaccaacaggagtttacccgccggcgtatggctgctaagcgccgggccgtattgcagcagacgggtaagctgcgcctgctcgctatcatttaacggggcgttcaggtcagcaaaatggacatactcagcgtatatattgtggacctggaggttggcagcctgaaagcgcgccagcagtttattgatacggaatgcagacagtgcaggcgaaccacgcagaatttccatcataagtctctcgtcttctaagctttggtgtgcgcaaggggggaaacggccgtcattataaagaatctgacgcgccgacgaaaccgtttgcgtagaaataaaatcaccgctttttcttgtcatacggtgcggctatcgttgcgaataagttgccaactggcgcattgttacgcaaaatgccgctcattaatgacttatctattgcagcaaaacatctttttcagcccgaggcaacgcacgatccagagaattaactaattgaaaaaattaaagattaattatctgctcatcggcatattgacgctgctgctggcagcagccctttggccctcaatcccctggttcggtaaaaccgaaaaccatatcgccgcgattcaagcccggggggtactgcgcgtcagtacgatcgactcgccattaacctattccgttatcaacggtaaaaaatatggtctggactatgaactggcgcagcagttcgccaactatctcggcgtgaagctgaaagtgacggtgcgccagaatatcagccagttgtttgacgatctggataacggcaatgccgacctgctcgcggctgggctggtctacgacagcgcacgcgttaaaaactatcagcccggccccatgtattattcagtttcgcaacagctcgtctaccgggtcggacaatatcgcccacgttcgctggcgaccgttaacgagaatcagcttaccattgcgccagggcacgtcgtggtcaatgatttacagcgtttaaaagagacaaagtttcccgacctgagctggaaagtggatgataaaaaaggctcgacgacgctgctggaagaggtcatcagcggcaaactggattacaccattgccgattcagtggcgatcagtctgtttcagcgcgttcatcccgagctggccgtggcgctggatgtcacggatgaacagcccgtgacctggtttagccgactggacgacgataatacgctctccgccgcgctgctcgattttttcaattcgatcaatgaagacggttctctggcgcggatcgaagagaaatatctgggacatggcgatgatttcgactacgttgatacccgctctttcctgcgagcggtagataacgtcctgccggagctggaaccgttatttaaaaaatatgccaaagagatagactggcgcctgctggcggcgatttcttatcaggaatcacactgggacccgctggcgacctcgccaaccggcgtgcgcggcctgatgatgctgactaaaaataccgcccaaagtctggggctgaccgaccgtaccgatgcggagcaaagcatcagcggcggcgctcgctatcttgaagatatgatggctaaagttcccgaaaccgttccggaagacgagcgtatctggtttgctttagccgcctacaatatgggttatgcgcacatgctcgatgccagatcgttgacggtaaaaaccaaaggcaatccggatagctggaccgatgtgaagcagcgtttgcctctgttaagccaaaaaccgtattacagtaagctaacctacggttacgcgcgtggacatgaggcttatgcttatgtggaaaatatccgtaaataccagataagtttggtggggtatttgcaggaaaaagaaaagcaggaagcggaagctatgaaactggcgcaggattacccggcggtgtcgccggaggagctgaataaagcccccttccccttcctgtcgtttttatcgcagtcatcaggctacctgacgcattcgccgtctttactgtttacgccgcagaagaaagaagaaaaatagcgcgatggtcttatcggatggcgacgcgcaacgtcttatccggcattgcgctatactgccggccccgcgccttccgcacggtcggctttcttcagagctttaatttcctgacgacgcatacggaaaaaatcactgagcagcgtcgcacattcatcgcgcaacaccccttcaataatctcgacccggtgattcattcccggatggtgcagcacgtcaattagcgatccggccgcgccagtttttgcatcgcgcgcgccaaagacaacgcgtccaatgcggctatgcaccatagcgcctgcgcacatcacacagggttccagcgtgacatacagcgtggtatccagtaaccgataattctgcaataccagaccgccctgacgcagcgccattatttcagcatgcgcagtaggatcgtggcggccaatgggtcgattccagccttcgccaatgacgcgatggttatgcaccaataccgcgccaaccgggacctcgcgttcgtcccaggcgcgtttcgccagcgtcagcgcgtggcgcatccagtattcgtgatctaattcgacatcagacaaagaggtaactccggtaatgaaagcgggcggcattatacacagacgctatgcgtttcactattcgagctgctgcaactcgccgtgcggcgtcacccgccagcgatgctggcaaaaataaagcagcgggttatcctgtttgctgtcgctgtagccgctataaagacgcagcggcgtaccgattttacgttccagttgcgcgactttttcatggcccagacagcgcacggttaatacccagccgccataccgtcgcgccatctggctggcgatgaggttaacgcgcggcagccacggcgtatcaaaatagacttgctctaccaatgattgcggagaaccggtaataagccagatatccgcgtcagagctcaatagataggtggtcagacgctcctgtacaaccggaaacgccgtgacgttagcgcgaaaccaacggacaaaatccgcctgatgcgcctgcaaacgcgtttcgctatggccaaaagtacagccccacaacaacagactcatcggccagcgggccgcacgcccttttaccagtaaaccgataccgataatgggcaacaacggcagtacgagcagcgcatttagcggctgacggcgcagcaaataacgcagaaaactgccgaacatatcctgttgatgtaacgttccatccaaatcaaaaaagacgacacgacgctcgtggctgaccaaaccttactcctctggatcattgaaccccagcagccaggtaaaaataaacccggcaattaccgctattaaatagcctaacagatagaacaggacttttccggcaacaattgttaatgccagcggcaaaccggaaataccaaaggtaattaccgtcgccactttccagtagctgatcaacgccccgcctaccgcgccgccgaggcaagcgccaataaatggcttacccaatggcagcgtgacgccaaaaatcagcggctcgccaatccccagcagtccgacaggaagcgcgcctttaatcacctttttgagtcgcgcattgcgggttttcatcagtacggcaatggccgcgcctatctgaccaacgcccgccatcgccaggatgggaaacagcgcgttatagccgtgcgcttgcaccagctccacatgaataggcaccagcccctgatgcagcccggtcagtaccaacggcaggaaggttccggctaacaccgcgcccaccagaaaaccgccgcgatcgatagcccaggacgcgccgtgagcgatagcgtctgaaatccagccgccaagcggttgcagagcgacaatcgctaccgcgccggtgataacagtcgtcaataaagggttaagaattaactccagcgaccccggcagcagcttacggaactggcgctcaatccagcacattaacgccaccaccagcaggacggcgataacgccgccccgtcccggctgaagcacctcgccaaagagcgtaatctgcgccagttgcgggctggaaaggatccccgccatcacgccgcctaacgcctgcgatccgccaaagactttcgcggtattgacgccaaccagaatgttcatgatagcgaacaccgcgctaccaaatatccccatcaggcccagcaggttaggataatggacggcaacatcgccgacgatatccggacgtttaagaatgttgataatgccggtaatcaagccggatgcgataaaggcggggataagcggtataaaaacattcgccagcttacgcaacgcatcgctcatcggcgctttatacttcgctttcgcctcggatttggtacgcgccatagcgtcatccggttttacaccacctgcggcaatctgcacgcgcatcgcatcaaccacctgcgcagccttccccggcccaacgatcagctgatgttgctccccttgctttacgtatccactgacgccaggcaacgcttttaagcgcggaatatccagttggctgtcgtcctgtacctccaccctgactcgcgtcatacagttttccaggcgcagaatattttgctctccgccgataccacgtaaaatgtcgctggcgagcgctgccgtcttatccatacacacctctttagtgttctaacgccgcccttaaaaagccctgatgagcggcaagtttttccctggcggctgcagcatccagccccgtaagcgccatcaaaatggcgggcttaacctcaaaatcggtctgtttcagcaacgcttctgcttcttcacgacctatcccggtcgcttcaacgaccatccgacacgcgcgatcgaccagtttgacgttggtggctttcatatccaccatcaggttttgatagaccttgccgaatttcaccatcgcgccggtagaaatcatattgagcaccattttctgcgcggtgccggatttcagccgcgtggagccggtaagcgcttccggcccgacaacgggcgaaatagcgatattagcctcccgcgcaataggcgaatctggattacaggagacggcaacagtggtacaaccggactgtcgcgcatagcgcaggccgccaatcacatagggtgtacgacccgacgccgcgagccccacaaccagatcctgttcttgcagatttagcgcgacaagatcgtcttcgcctgcctgttggctgtcttccgcgccttcgaccgctttcagcaacgcgcccggcccaccggcaatcagcccgacgaccagaccgtgcggaacgccaaacgtcggggggcattcagaggcatccagtacgccaagccgaccactggtgcccgcgcccatatagatgatacgtccgccagacttcagcgccgccgcagcggcatccaccgcacgcgcaacgtcaggcagagtggcttttaccgcttccgctaccagcgtatcctgttcattaaaacgcttaactaattcaggagtaggcaacgcatccagatccatcgtttgcgggttacgggtttcagacactaaggtaccaagattcatttttgtccctctggaatttttaattcataataagcgtccatgatggaatagaatattcccccaggcgagtgaaatttcgttttgtcgtcgccatcacgtttcgcaggagctgcccatgaactgtttgattcgtattcgccagcgttatccggatctcgcgcaaagcgacaggaaactggcggattatctgctcgcgcaaccggatacggcgcggcatctgagctcgcagcaactggcggctgaagcgggcgtcagccaatccagcgtagtcaagttcgcgcaaaaactggggtttaaagggtttccggcgttgaaactggctctcagcgaagcgttggccagcaatcctaatccgcattccgttcccgttcataaccagattcgcggcgacgatccgatgcgcctggtcggggaaaaattaattaaagagaatgtggcggcgatgcacgccacgctggacgttaacagtgaagaaaagctgttagaaagcgtcacgatgctgcgccacgcccgccgtattgtgatcaccgggattggcgcctctgggctggtggcgcaaaattttgcctggaagctactgaagattggcattaacgcggtggttgagcgcgatatgcacgccctgctggcgacggtgcaggcgctggcgccggaggatctgctgctggcgatctcttattccggggaacggcgcgagctgaacctggcggcggacgaaacattacgcgcaggcgcgaagatcctggccattaccggtttttctcccaacgccttgcagcagcgcgccacccgctgtctgtatacgattgctgaagagcaggcgacgcgcagcgccgctatctcctcgacacatgcgcaaatgatgttgaccgacttactgtttatggcgctggtacaacaggatttagagcgggcgccggagcgtattcgccatagcgaggcgctggtaaaaaaactggtttgaaaatggctcttccgcctcatgcagaagagctatcaagtttattgcgcttctttagcgtgaatcaattgcgtcaggagtttgttaaccggtacggcaatattgttctgagcgccgattcgcgcaatcgcaccatttaaatagtcgatttcggtcagtcggcctttatgtaaatcctgatgcatagaaggatagtggtggccgctctcacgcggatcgaacactttcttcaccgtattcatcaccatttgctcagtcaacggaatattctggctggcagcaactaacacaaactcatcaactaccgcttgcgctaaatctaaagcaccaggccgctgaccaaatccgccgacattacaatccagtaacgcgcaataggtgttcattacgctattaaaggctgctttcttccagatcgataataatacgtcagggcttatttcagcattcaatccagcactattaagggtggcaatgaccttagcctcttgagccgaatcctggctggctatcggctgcagttcaatcgttccggtaccggtggccataatatgcccagccccctccagttcgctggaccataacgtcacacccgcatagattttctgccgatcgacatatttctccagggtttcgatatttcccaggccgttagataaaatcatcacgaccttcgcggctggcagcagcggcttaatacgctgtaacatgctatccaactgcatggctttggtaaacagaataaccagctcaaactccccctgggattcatcagccaacatagcagggatggggtaatacttctgagtcgtttccgtttcgacaaacaaccccttgctacgaatagcgtcgacatgctcctgccagccatcaataagcgtcacgtcgtgcccggcctccagcagcatatagccaaaacgacatcccatagcgcctgcacctgcgattgcaattttcatttttatttccttattatctgattaatgaattttggctaaaaccgttgcgacatattttttcgttatcagggtcaacacgactccaataagcaatagcaccgttgtcaaaataaatactgtattgtagcttccggtatattttgcaatagcggacgtgacgtaaggagcaataaccgcaccgacggcaaaaccaaaatacataaagccgtagtttagtccctggttacgcataccaaaattctggctggtcaagccagggaagataactaatataccggcataagcaaagcccacgcccagagcgctgaaatagaataccgaagtattaccgttgaagaacaacagcagcagcatacagacgcaggtaaaaagataaacaataaccagcgtattatagccgcctaatttatcggttaaccctccccagaacaggcgaccgatcgagttaaatatcgagaccaggctaacgactaatgcaccggacagtaaaccgtactgcgtcataccaatttgcgcagaacttgagctaattaccatcccagagaacacgcccagcgccagaatcataaacagcagccagaagcgcagatctttcagcatgtgccgatagtctttatccagtggcgaggctttaattcctccgctatcttttgctggcgcgctacgaataaagagctggacgataaaaataaccaccagataaacaatacccagatataacaacgcccgactaacatcatgagtttgcgccataaaatattcggccaggcgggtgcaaagtagcgttccgacgccaacacccgccagtacgataccgctggcaagaccgcgacggtcagggaaaaatttcagaatattattaagattacccgtaaaagccaggcccgatcccaacccggcaatgacgccgtaggttaaaaacagcatgggcaaattatccacaaacccggacaagataaaacctaaagaaaacaggataccgccgataactatcgcctgctttcctttaccattgtcgatcattctcccaccccaaatcatcggtaaaggaatgatccccatgttgatagagaatgctaacgccagcgtagccggatcccagtgatattgcgccatgagtggtgttttgaaatagctaaatgcgtagacgcccccgagcacaaaattgatgcacacgtgagcggcaagcattccccagcggttgattgatgccgacataattttccctttttaaaatgcactgatcacagtttaaaaaaagcaaaataggcaaacaatttggtattttttataatcgttataacaaaacccaatcgattggcattaaattttaatgaatatcaaacaactacattccttcctgatattgtgtgatgaattacattatggtcgggcagccagtcgcctgtttatcactcagccatcattaagtcagcaaatcaaacaacttgagtcatcacttaaaacaatattatttaagcgaaaaggtagaggaattaaattaacaaaagcaggcattattttgcaacgacacgctaacaaaataatgctggatttaaaaaatgccgaaaatgaacttcttccctatcaggatcaacagcgcgatactatttcaatcggggtgtcaggcagctacctggtcctgcccgcttttcgcaactttatggcgcaccatccggaaatatctttaaatgttaaagagttctcaactgagcaaaccattaaaaagctgacggatagcgccgttgatattggcattgtttatcgaacagcgctccctgcccagctaagctcgaccatgctgtttgaagatgaaattatcgctgcaatcccactttctcatcctctggcgacacgcgaacgtctgcatctaaaagatttaaacgaccagcccattatcgtgcttaatgactctctgctattaagagggatcatcaccacagaatttaataaccgcaaagtcgttcctaacgtcatctgcgaactggataaccactactcatgccttgagtatgccgaagcgcagattggcatcgcatttattacccgctcgctaacccatttatcgacacccaaaaatgttcgcctggtttcactgggcatccccgcattctttattcctgtcatgctggtgcacagtaatgacctttcactggataacgcaaccatctgcctgctcaagcagatcaaaaatttttacactgtagataacaaatcagcgccagaaaagagctggcccgagcagaaaataggcgtataatgcccgcccgatttgtgttgtttctgagaatttcctgatggcgctgttaatcaccaaaaaatgtatcaactgcgatatgtgcgagccggagtgcccgaatgaggcgatttcaatgggcgacagcatttatgaaattaacagcgacaaatgcaccgagtgtgtaggccattacgaaacgccgacctgtcagaaagtctgcccaatccccaatacgattttgcaggatcccgcccatgtcgaaagcgaagaacagttgtgggataagtttgttctgatgcatcacgcagataaactgtaagcgggttaacgtatttccaacgcaacaatgtctgatggcgctatgcttatcaggccgacaatatatcggcctgtaggtcagataacgtgtttacgccgccatccggcaaatctaactttccagaatgaccgtagcgcaggcgtaatggcgttcatcggccaacgtgacatgcatgtgcgccacaccgagtttttccgccagcgttaacgcctcgccccacagccgcaaacgtggttttcccagctcatcgttaaacacttcgaactgattgaacgccagaccgttgcggatgccggtgccaaaagctttcgctgccgcctctttgaccgcaaaacgcttggcgagaaaacgcaccggctgctgatgcgtctcccagatagcccactcgttgtcactgagcacacgccttgccagacgttcgccggaacgggagatcactgcttcaatgcgggcaatctctacaatatccgttcccaggccgagaatcgccattagccgcgcgcttccagcatcaaacgtttcatttcagccaccgcctctttcagccccgtcatcactgcccgaccaataatggcatgaccgatattgagctcgtgcatttccggcagtgcggcaatagctttgacgttatggtaggtcagaccatgacccgcatttacttttagccccagacgggccgccagggtcgcggcgctggcaatacgcgccagctcttttgcctgttccgcatcggtttctgcgttggcgtagcagccggtatggatttcgataaacggcgcgccgacttccgccgccgcgttgatttgcgtttcatcggcatcgataaagagcgaaacctggatgccagccgccgccaggcgcgcacaggcatcacgcattttatcgcgctgtccggccacatccagaccgccttcggtggtgacttcctggcgtttttccggcaccagacaacagaaatgcggcctggtttctacggcgatcgccagcatctcttcggtcaccgccatctccagattcatacgcgtatgcagcgtctgacgcagaatgcgcacatcgcgatcggtaatgtggcgacgatcttcgcgcaggtgtacggtaatgccgtccgcgcctgcctgttcagcaataaacgccgcctgtaccggatccggatagtcggtgccgcgcgcattacgtaacgtggcaatgtggtcaatattgacgcctaacagtaattcagccatgacaatcctcgttaatctttcttcgtttttactgtgcgtttgggcataaattgccggaacagctcccggctttttaacggttttcccccaagatacggctttaatgccatacgggtaaagcgtttagcggcacgcagggtatctacatccggaaattcccgcgcctccagcgctttcaggtgccgtccggtaaaggtgttgttatcgatgacgacgctggcgaaaaagcctttttcttcgcggtaacggtaggtcatggtgtcatccacccgttcgccgctgcctgcacagtgggtgaaattgacgccataccccagatgacccagcaacgccagttcgaaacgtcgcaacgccggttcaggcgagccggtggttcccgccagcgcctgaatacagttcagataatcaaaaaagagttcggagaagcgcgtttcatattccagtacgcgagagaggagttcgttgatatacaggccgctatagagcgtaataccgcttaacggcagcgccagagaaactgcctcggcgctgcgcagggttttcacctcgccgcgtccgctgtagcgtaacaataacggtgtaaaaggctgtaacgcgcctttcaaattggaacgtttagatcgcgcgcctttggcgacaaggcgcactcgccccgattcttccgtgaagacgtccagcatcaggctggtttcgctccaggggcgactgtgcaggacaaatgcgcgctgccacccttccacgctgtgttaactcacagatcgtctacgtaaccgagactgcgcagagcgcgttcgtcatcggcccagccggatttcactttcacccacagttccaggtgtaccggcgcttcaaacatctcctgcatgtctttacgcgcttcaataccaatggttttgattttggcgcctttgttgccaatcaccatcttcttctgcccttcgcgctcgacgaggatcagcccgttgatatcatagccgccgcgttcgttggtaacaaaacgttcaatctcaacggtaacggaatacggcagctcggcgccgagaaaacgcatcagcttttcacggatgatttcagacgccataaagcgctgagagcgatcggtgatgtaatcttccgggaagtggtgaatcgcttccggtaaatgtttacgcacgataccggcaatggtatcgacgttcatacccgtttcagcagagatcggtacgatatcaagaaagttcatctggcttgccaggaactggaggtgcggcagcaaatcgactttttcctgcacgttatccaccttgttaacggcgagaataaccggtgctttgccatcgcgcagtttgttcaggaccatttcgtcgtccggcgtccaacgggtgccttccacaacgaaaatcaccagctcaacgtcgccaatcgaactgctcgccgccttattcatcaaacggttaatggcgcgcttttcttccatatgcagacccggggtatcgacatagattgcctgatacgggccttcggtatgaataccgacaatgcggtggcgcgtggtctgcgctttacgggaagtgatcgaaatcttctgcccaagcagtttgttcagcaaggtggatttgccaacgttcggacgtccgacgatggcaataaatccgcagtaagttttgtcagtgctcattccaactccagttttttcagcgcctgttcggcggcagcctgctccgccttacgacggctggaacccgtgccaaccaccggttcgctcaggccgctgacctggcagtggatagtaaattcctgatcgtgcgcctcgccgcgtacctgcacaaccaggtaagatggcagcggcagatggcgaccctgcaaatactcctgcaagcgcgttttcggatctttttgtttatcgcccggacttatctcatccagacgggttttataccagttaaggattaactgctcgacggtctggatattactatcgagaaatactccgccgattaacgcttcaacggtgtccgccagaatggactcccgacggaatccgccgctttttaattcgcccggccctaaacgcaggcactcgcctaaatcaaattcacgggctaattccgccagcgtattaccacgtaccaacgtggcgcgcatacggctcatatctccctcatccacccgtggaaaacggtgataaagcgcgttagcgataacgaagctcaggattgaatcgcctaaaaattccaggcgttcgttatgtttactgctggcgctgcggtgagttaatgcctgctgcaacagctcctgatgattaaaagtgtagcccagcttccgttgaagccgattaattacgatggggttcatgcgataccaataaatgaatgcgtcaacaatccagcacacgaaacagacctgatacacgtcatctgtcctgccgcatcgctgcagcggaaagaaggttgtctataaccaacgctgtttcgtgtgccgtggcgaccaaacggcgccaacctaaaacttcgggggaatattctatacacaacgacaggggatgtcgttagtcttagggaatttatccaggaaataattcacgctgccgctaaaaagacggcagcgtgaacgatcatttcatcacagttagtgaataccgccgatacgactcaggcgtacgcctgtcggccactccccttcctgcttgtcaaagctcatccagatagcgaccgctttaccgaccagattcgcttccggaacaaatccccagtaacggctatccgcgctgttatcgcggttgtcgcccatcatgaaatattgtcccggcggtacaacccaggtcgccagcggttgtcctggctgttggtaatacatgcccaactgatcctgagctatcggcaccatcaggatgcggtgcgtcacatcgcccaacgtctctttacgttcggtcaggcgaatgccgttttctttcgtctcgtttagcggaacttcaaagaaaccgctggtcgcttctccgccgttacggcgggcaaaagtctgtacaaaatcgctcggctcaacgttagagtaggtaaccggcagcgcattttcgcacgcctgaccggagctacagccaggctgaatcgtcacctctttcgcaaccggatcataagtgattttatcgcccggcaaaccgacggcgcgtttgatgtaatctaacttaggatcttccggatatttaaataccacaatatccccgcgctttggatgaccggtctcaatcagggttttctggtagatcggatctttaatgccgtaggcaaatttttccaccagaataaaatcgccgataagcagtgtcggcatcattgagcctgacgggatctgaaagggttcataaagaaatgaacgaacgatcagaacgatcgccagaaccgggaaaaccgacgccccagtctccagccagcccggcttaggcgccactttattgagcgtagcgttatccagcgcatctcccgacgccgtttgcgcggcagcctggcgcgcccgacgttttggcgcgaaaacaaacttatcaacgcaccataaaatgcccgtcaccagtgtggctatcaccagaatcagggcaaacatgttcgccatgccaactccttagggattatttattgtctttaccgacatgcagaatggcgaggaacgcttcctgaggcagctcgacgttaccgatctgcttcatgcgtttcttaccttctttctgtttctgcagcagttttttcttacgactgatatcgccgccgtagcacttcgccagcacgtttttacgtaactgttttaccgtcgaacgggcaataatatgcgtaccaatcgccgcctgaatcgcgatatcaaactgctggcgtgggatcaaatctttcatcttctccaccagctcgcgaccacggctttgcgagttatcacggtgcgtgatcagcgccagcgcatcgacacgctcgttgttgattaacacatcaacacgcaccatatcggaagcctggaagcgcttgaagttataatccagagacgcatagccgcgcgacgttgatttcagacggtcaaagaagtcgagcaccacttccgccatcgggatttcataggtcaacgcgacctggttaccgtgatacaccatgttagtttgtacgccgcgtttctcaatacacagcgtaataacgttacctaaataggcttgtggtaacagcatatgacattcggcgataggctcgcgcagttcataaatgttattcaacggcggcagcttggaggggctatcaacatagatagtctctttcgccgttgtttctacttcatacaccacggtcggcgcagtggtgatcagatccagatcgtattcgcgttccagacgctcctgaatgatctccatgtgcaacaggccgaggaagccgcagcggaaaccaaagcccagcgccgaggagctttccggttcataaaacagtgaggcatcgttcaggctcagcttgccgagcgcgtcgcggaaactttcataatcgtcggagctgaccgggaacagacctgcatagacctgcggtttcaccttcttaaagcccggcaacgctttttccgctgggttacgcgctgaggttaaggtatcgccaaccggcgcgccgaggatatctttaatggcgcagaccagccagcctacttcgccgcacttcagctcggtacgatcaacctgttttggcgtgaagatccccaggcggtcagcgttgtaggtctgcccggtgctcatcactttaattttgtcgcctttacgcatggtgccgtttttaatacgcaccagcgataccacgcccaggtagttatcgaaccaggagtcaataatcagcgcctgcagcgggccgtccggatcgccttgcggcggcgggatatcgcgcaccaggcgttccagaacatccgtcacgccgacacccgttttggcggagcagcgtaccgcgtccgtcgcatcgataccgacaatgtcttcgatttcttccgccacacgctccggatcggcggccggcaggtcaatcttgttaagcaccggcaccacttcaagatccatttccatcgcggtgtagcagttcgccaacgtttgcgcttctacgccctggccggcatccaccaccagcagcgcgccctcgcaggcggctaacgaacgggaaacttcataggaaaagtcaacgtgtcccggcgtgtcgataaagttcagttgataagtttcaccatcagacgctttaaaatccagcgtcacactctgggctttaatagtaataccgcgctcacgctcaagatccatcgaatcaagtacctgagcttccatttcacggtcagacaggccaccgcagatttggataatacggtcagacagcgtcgatttaccgtggtcaatgtgagcaatgatggagaaatttcttatgttcttcataaatatgaatttttcaactcgctatgctgataaatttttcttgatggacacagcggtggacattccacaataactaccccatcaacgactggcgtgcatattacactgtagctttgaaatcgtcagcatacgatctgctgatcaacatacgatgttacatcacaatagaggtctatacgatctataaacctataaacacggttacagtcagtcctgactaaacagcagccggcctaccgcagtcacgttcttgcagacaacgtgactgcggtaatccatcccaccggattgtcttcaaattctccatgttgctgaatcggctaacagcttcttaaacgatcggtattaggctaggttctaaatcttgcctgaatgaaaataaatgtaataatgatagcttggtattgacatatagattgaaaaagcgcatgaaaataggattccaaccagccatattgcaatatgcatatacaagtaacgaggcgacatcaaaccttgagttattaaataaatggagaatagaatccccagatattgagaaggaggagcgtaatagtatttacgacaaaataatagaagcaaatcataccgggagcttatcaattactgctcatcatgttacctctattccggtatttcctgataatttatccgaattgaatttatcttcatgctatacactggagtctattccaaatcttcctgatgggttaaaaagtttaactatatctggaaatcagaccattaaaatttcatatttcccagatagcttagagtcactatctatagatatgcaggcatatgaagaaaattatactttccccgcattaccttatggattaaagagttttactgcatgctatggtaaatttttgcctccccttcctccgcatctatcttctttgtcattgcaaaatttctctgaaatattatgtgctgagttaccatataaattagataaattagatttacaaaattgccctttcttgccattaatgaaaatgttacctgaggagttaaaagaactaagtattgaacttatacgaacagttcccggtactgttatagatgatattttgcctgataagctaaaaaaattaagtatcaacttttgtgataatattaaacttccagttaagcttcctgttaatttaaagtctatcaatttatcctcaaggacccctattgcatgggaaataccaacctgcaatctgcctgcacatatagatattagtaccgatggttatgttaagcttaatcctgaatttcttaccaggagtgatattacctttagtaacaaacctgcaggagatgtgttaagttttcagcctggagatgtggtttatggtttatgtaaggcaagagatcgagtaaatactttagttaattcgttatattatttttcaaaaaaagatattattattcaaaatacattaacagatgcggtctgggacaggaagaatagagccgtgtttaataaagatgagaagatagcagaaagattgaatgatgttcagagagggattttttttagagaatttttatctcaacataaaaaatacaatattaccgaagataaatattcagacttatccaatgaggagtgctggataaaaacaagtaaagccggtcttgaatttcaaacacgattgagggaacggtcagttatttttgtcattgacaatttagttgatgctataagtgatatcgcaaataaaacaggaaagcatggtaattctattacagcacatgagctaagatgggtatatcggaatcgacatgatgatctggtaaaacaaaatgttaaattttttcttaatggtgaggctatttcacacgaagatgttttttcattagttggttgggataaatataagcctaaaaatagaaatcgttgactttaaaaaaatatgcaattaatatatttatatatagagcagccctattggagttaaggatatatactccccctaactctagactacatgccaactttacttagtatcatattttcttgctacatatctgtttggcaagggtatgaataaaaaacaagattaatttaattgatatcgcaacagataagcacctgcatttatctttaaacttttttatggccaaccagatttttcaccatctgcgcacgtttattcgggcatgcgttgaaaacctgcaaaaaaagaaaaatatcgatgcttattattttttctttaattaaattttcgctcaacaaacttaattattaatccaatgacagtgaagtgtgaactatgctgagcataaacgacatcaatagcaagggcaagggcaagggcaagggcaagggcaagggcaagggcaagggcaagggcaatctgagtatttacaggtgaaattatgaaaaatagtatatttttaccattgcttctggtgctgtcggcaacgaccttttcggcattggtgatggctgccagtcattctccccaccagataatacaaaacatttttccagtggctggccgccagatatcctgaagcaactgaattggtctcaggtttgtggttgttagtatactgaatattacttcaggatggcatgttttattgacaccagcctgatttttcacaacgttatattacccgtttacagataattcccagctaataaatcaggaagttccagatgtaacagaagttatgaggtgtattaattgataggtctaacaggcttgaattacttttctttaaaaactactgcatgtaaaagggtctcctcttgttgtgatgagattcgtatatatttatatcttagtgatttatggatcatacttgtggttttccttaggaggtaacatgtttacaattaatagtactaacagggtggcgagcacaatcgctccatatgcatgtgtaagcgatgttaatttagaggacaaggctacatttttagatgaacatacctcaatacatgcgaatgattcttctttgcaatgctttgtcttaaatgatcagcatgttccgcagaatacattagctacagatgttgaaggctacaatagaggattacaggaacgtataagcctcgagtaccagcccctggaaagcattgtttttctactcggcacccctgcagttttagagactaaagagtctttatcattaccagtttccccggatgctttaacccaaaaactattaagcattagtagcaatgatgaatgtaaattatcaggtagcaccagttgcactaccccagccagtcataacccaccgtccggttatatcgctcaatacaggcattctgcagaggttttcccggatgaataaaacaaagcgttataaatagctgcgccgaatagtagatcactttgattgaactcagtccggattgtgtgatttgatcaatcgccaaaaatcacaaatcaccaaccggactaagcgatgccgatcatagcaccaattccccgtaccgaacgacgcctgatgcagaaaactatccataaaacgcgtgacaaaaaccatgcccgcagactgactgccatgttgatgctgcaacccgggagacagtatcggccacgttgccagaacgctctgctacgcccgttcacccattggacgctggattaactgattcaccgctgacggtgtggaggcgctggacaagtgtgatgcggataatcctcatcatatggtcatgtatttttcataaacaataaagctcgtccaggagtgcactaaataacagattgttagagcttgcttaaacatcagtcgtctaagtttaccttaaagcaagtggcgttttatgtcccatatatgccccatcacatcctcgttccatcatcaaactcactggatctcatgatgttgtagggaagtaagccggagagataatttccttctgtgccgtgccggcagaagaatttatctggcacgctgtctcgcgctgtatggagtgtgaagagccaacacccggaattgattgaacaagttacttaacacgcaatagctcagagtatcttgtggtgtaccgcagcgaaagtatttctcgcttcatagcccactgttgcggtatcccctgcccggtgattttctggttgtattgtcatgtgcgcatatttaagccagtttagagactgggaattttctgtacagcgtcgacagccccgcatcataaataatcgttacctgctgtcgcggtactcctgccctaatcaggcgcccggcctgcgctcccagtggatgggagccagtaaggatttgaatagcacatgaactcactctcatatgaattaatttacattggaaagaaaatataatagcgcttatcatttttatttaagttaaatattttataaatggtttttatttactcacctgatggtaatgaataacgtttaatatctatagtaaaggatgctgtaaccgtaaggatagtgtgccaaaatttaacaggcaacgtattattaaacacgttaagagcgtatttttagcaatgattttaatattaccatcttcactatattctgctcttacaatagcggcagactctcaagatcataaaaaagaagaaacaattaagccaatgcctcaaaagtggtgtaatctttggcctgctggcatacccttccctgaagattggtttaaaatgtgtagaggttattgagtataaatttaatatactaaccagtaaccatatcagttatgacagacaggtcttcttcatatttgctataaataaggcctgagctttcctgacaaattataaactactggctggtttctccggccagacaggctttaaagtatcaacacggtttacctgtacccggtactttctccatgccagaagagaagctttttctttatcggttgcttcgtccagatccactgcatcctgtaacggcgcgattttttcagatgccatttgcaaaagacggcttttggtcccttcagcttcacgaagtctggccgctgtttccgcagcttcatccttcacccacgccttaccatcccatttctggtattcaccgtctggtgaaactgatgtgacattttcaggtagcgggccgggagcggaaatataaacctgattgccggttgttgtgtcgtaaaccgtctcgccgcggtggtcctcatgcagactccacgttccggtttcagcatcaaatatcgcaatatgactggctggaatatccgggggcgcaatatccgtacaatttgccggtaatccagtgtgtggcgggatatatgcatcacctgcaccaataaattcgtttgtatctgaacgcagattaaaaattttaattgtctgcggggtatcgctcattttaaacgtcattttttactccggataaatattcaggtttcaggtgctttccatgagaattggggctaaggaaaacagcatggctatgcgcaccaatataaatatcatcaacctgatgacggggactgatgcaggtgttacctgattttttgcaatacgttctgtaatcaccaaaaccgatatattccgttctggcgttcggacaaagcgcctttgacggacagtatgccgttgtactgaatacagcattctggcgggcgctggcgtattgccagttaatttccgtggtgcagttaataaaaccatcccacgccagcttcatttgccgggcgacactgcccggggatacctgaccacacccggcccccatcgcagggaatactaccgatttaattttcctgtcttccccggcgcttttattgtgctgaaatatcgctaataacgctgcacgtgttgcattataaaccgcgtcggtgccgtcgattatcagcggaacgcgcatcgtcggggcgtgaaccagccacggatatttactgttacccgtttcaataacaaaggcggtgccgacgggctgttctcccagatattcacggaggatatgttgctgtacccgttcctgtaattgcggcccgaaatatgccgtaatagcagcatccacaccaccatccataagaccaaagctgttggccgcactgaccatgcagtcaaattccggtatggtttcaaacggtccggggataatttccacattttcggtattctgaaaagaatgttcaaaagccacggccattgctggcacgggtgctgaaagaattaatttaatcatgccagcctcactatgtagttaaatgcaatatttttaaccgtggtttccgcattaccgtctgcgtccacaataacgacgtgaccgtgtggaccgatatacatggtgtgctcgtgtcctccgatataaactgtatgcgcatggtcgccagcggcctgtgtccatgcaccacctccaggctgaaatgaggtgtgattggagtctccccagtatgaattgatataaccgccgaactggtgagtatggttgcccgtggtattggtcgatttcgtgccgtaatcaaaagatgaggtagattttgtccctaagtcagtatcctgcgcccgcgcggtgtgcgagtgcgatttattgccgtccatttcttgcgacaatacggcacgtccactgatgggcttaccctttattgtccagcctctcatgtcagggataacgccggacggatacgctatagccagtaacgggtaagcagatttatcgaaggactgcccctgcatcagagcgtaacctgccggagtagcatcagatggccatgcaatcgccgcccctactggatgcgaatccggaggtgggtttagtgtggtgtaaagcattgcccattcggaccactcagcatcggcggtatctcgatggctgcgaatatatgcgggcgctggcgcaccatttgtcccgctccagccaatgaggatttccccatcaccggttccggtcagacgtaaaatatttccgtattgcgtcggatagccattgttgtagacctcgcccattatcaggccgccatcgctgcctcttgtcgtgccagtcagtgccggaagcgcgccgcgtgatgcaagcctgttcgctgcgacagccgtaccaccagcaggcaacgcaccagcagccttatcaattgtgctccgtaaaccaacgtattcgataagaccttcaatgctttttcctgacagcgccgtcagtgtatcgtccagcggctgcttgcccgcaatcatgttagtgatagtggtagcaaaattaggatcgttacccagcgcgtcagccagttcctgcagcgtatccagcgactcaggtacggaaccgaccagtgcagcaatcagtttacgaacaaactcagcgtttgcagtctgaagtcccttagcgtcatctggcggcgtcggtgtggtcggcgttccagtgaataccggactgtccagcggcgctttggtctgtacctcgtccatgacagcatggaccgcctttggcgtggctgccagcgcttcgctgtcactgtccgtggcgctgcttaacttaacgataccttttttcgtcaggctggcatcttccagggaaatcacgtccgcgatgtcttctgcccgttttgcggcatcttctgctctggtggctgctgctccggcagcagtactgctttgcgccgccagtgatgcgctggtatcagatgcggcggcgtgattggatgcctccgatgctgatgacgaggcggctgttgcgctggccgctgctgtacttgctgacgttgcagcgtttgtctcagatatttttgctgcggctgccgatgcggctgccgccttttccgacgctgccgccgcagtggctgacgcacctgcatcaccggcactggaagccgcctgcgtttctgacgtcttcgcggcggtttcggatgctccggcgcgcgctgctgatgtctgcgccgccgtcgcgctggcggctgcggcagcagctgaatcgccggcggcagtacgggagacatctgcattcgcttcagatgttttcgctgcggctgccgatgcggctgccgccgttctggctgtgtcagccgacgccgcgctggctgatgcctccccggcttttgtggtcgccgtacctgcgctgctctccgcagatgctgcggatgaggctgcctgtgtggctgatgcttctgccgctccggctgcattcactgctgccgtggcgctttccgctgcctgacctgctgatgtctgcgcctgttcagatgcctgccctgcggcggtggcattccgcgatgcctccgatgcctggcgggcaacttcttccaccatcgcctcaaaacgtcgcagcgcctccgggcggacgtcgtcttccgtcatggcccccagaaaatcattcagggtgcccggttttgaatcatcgtagaccgtaataactccggcatgtgacgggggatacccttccaccaggagcgtgactgtgtactgcccctgctccacatccatgctgtagcgcccggcgtcatccggattttccgatgccaccgtattcacgaccaccgtcgtactggtccggcaggccttcagctgaatggtgcagttctgtaccggcgttcccgtaccatctttcagtacgccggaaataagtactggcatattgcctccataaaaaagcccgcccgcaggcaggcttcagattcattcacatctcagcactgattatccgggtcacgtaaatatgccggcagcgaacactggacgctccgcgtgattatttgtccctttgcctcgcggtgctgtttctgcccgcggtcagtaccggtataaatccgggtctggttttcaatattgctgttaccgcttcctcttccgttatcggcaacggcagcggtggaaaataaaacggacagggaaacccctgccgccagcgaaattacgcgcgacatagtcatatctgttccttgttaaacgaaagagaccggaaatccggtcagtttgtgaagttgttccccgaccgggaaaccatcaccagcggccagacggaagcagacgtggtgtactgcccacgaaccctcagagaaacgctgatatccacgacaggtgaagtggtgtagaccgaaaagacaacggtctgatacatggccggaagccctgcggtatacgggataacctccgccgttttcacctggccgttaatatttatcgtgacggtgatggcaccggagccaccgttacgctcacagttagccatcaccgtgatggttttccctatctgataggtggcgctgtcggtataccgtgttgaggtgctgcgttcgtcgttcgtctccctgatgctcacgccctgcatgacttttgagccgcagatatcaccgacaaactctcttgcttctatcacgccagaaaacttaccggaggtggcattgatttctcccgtaaacgagccagatacagcgttgatatgcccgctgatatccgcatttttcgcagtcagctttccatccggcgtcagggaaaatgccggaggattcccgccactggtaatggtcggcgcgctcagatatttcaggaacgcctcattcatgattatctggtcgccctgcatgacgaatccgggcgtctcgtttccgtttgccgggttaatataagcaatgcgatccgccgccaccaggaactggcttatcttcccgtcaggcatgtcttccatgctcagtccaagtccggccacataatatttgccgtctttggtctgctctattttgacgccccacatggcgttccatttatcgttagcatcctgccactccttcgaaaactgctgcagtttgctggcgttatcctccgtcagttccaccttctccagcagttccttacccaggtgactttcagttatctgccctttgaaaaaatccagatagcctgcggcatcgttgctggcctgcccggtcgcctccacgaatgcggatttaccgacctgatttaccgcccggatataaaaatagtaatccctgccgggcctgatattcacactggccgctatccagtacagcgccgttcccagatatcgtgcggcgttttccacctgatggatatccgtaatctgcgcgtctgaaaaccagaactcatactgcaccgtcgggtcgtataccgcctgacgcggtgtggctgtaatctggaaatagccaggggtgagttcgataaatgatggtgccgccggcgcggagatgctgaactgtgtgctggccgggtctccctgttgtccctggctgttcaccgccctgacggacagggtgtagcgccccggcgtcagcccccggaaccggtactgcgtatccggcgttcctgcgctgcttaccagccggtcactgccatcttccgccgccacgttcaggcgcaaagaaaacgaggcgcccttaacgactcgcggtgtgtcccagcgcgccagtacctgatactgtccctcctccgccagaatttctgtggtcagatgctgtatcgccgggggaacggtgccgtgaatcgttccgggttgcggatcgaatgatgccccgttgtccacgatggactctttttccggcacatgctgtacggcggtgatggcatacgttccgtcgtcgttttcccggacagccacacaccggaagagacgctggcgcagcgacggcagtttcagcccccagacgctgtattccgccacgccgtccggtatccggctgacctgaacctgcacaccgtcggtaacagactgcacgtccacgctgaccggcaagccttcgccatccatcaggcttatcagcgtggtgccggacgacggcagggtaatctccctgtcaagggtcagaatgcggcgggcgcggtcaacggacagaatccgcccgcccaggctgatgccggcataatcctcgtcgcaaacctcaatcacatcaccgggaacgtggcgcagcccctccgcacccacactaaaatcaaccgtctgggtttccagcagctccgtttttatcagccacagcccggcgcggtgcgcctgcccgcgactggtacagccaaacgcatccatttttaccagattgcgtccgtagtgactgatggcgaccgtgtcttccaccagttccgtggatgtctgccagccattatcagggtcgatccagttcacctctaccgcattatggcggtccttccgcgcactgaagctgtaacggaacggtgtgccctcatccggcattaccacattgctgcgggtataggtccagactgtatccgagggcctgtcctgcacgaaggtcatcatctgcccgttccacaccggcatacaacgcatggcggagcagaagtcggtcagcacatcccacgccttacgctgctgtgccagatacgcattaaaggtcatacgcggctctgtcccgccgaatccgtcagggaccatctggtcgcagtactggcctattgcatacagcgcccacctgtccacgtccgccgcgccgattcgctgtcccatgccataacggggatgtgtcagcacatcccagagacaccacgccggattattgctgtatgcaggcttgaacgtgccgtcccagatgccgctgtaggttcgcgctaccggatcgtaattcgacggcacatgaataatccgcccgaaaaaatggtaatttcgcgtcacctgctggctgccgaactgctcagactccacctgcaggccaattacggcggtgttgggatagcgctgccggacatcaataatctcggtatacgacgaccagaccgtgttgttctgtaactggtcagtggtactgtctgccgtcacacgtaccatccggataccaaatggccggggagggagattatccactatcaccgaggccagatactgtgtggttgttttcccggtaatcgtaatctctttttccaccacccactgaccatagcgctcaagatggatttgcagcctgaccgatgtcggattgcggtcgcccttgctgttggcctccaccagtgactgcacgccgaacgtaaaacgcaggcggtcaatatttgcagccgtgatggttctggtcaccggattgtcgtatttgacctgtacaccaagcaccgtctcggcgccggacgattcaaatccctccagcggggtctgttcctgctcaccgacgcggtataccaccttcacgccgtggatattcgtgttaccgtcgcggtccaccaccggcgtctggtttaccagaacactttgcagaccgttcaccgggccttctatcggtccctcgctgatggcatcgatgacgctcagcagctgcgtggatttaaggttatccggtgcctcgcggggcgtatgcccttttccgccgccctttcccatttattaccccgtaaaacgacaaaaccgcccggaggcggttctgtctgaatctgttctgttgtcagcggccaatcaccacaacctgaccaccatctccttcatcagcggtactgacttcctgggaaatcacgcgtgaccccacctgcatctcgccgtacagcaccggcaacgtgttaccgttggcaaccatattatccagcgacgagaaatacgtgttctgcctgccgttatcggtctgcctcatttcggacattttaggttttggtgccagcatctgcgccacaccgcccagaaccatcgacgccccggtcatatacataccggataccgccgccgctcccagccagcctgccgggttccaccaggcaacggcaatcagcgccgcaccaagcaccgcctgaaacaccccgccagatttggccccgcccagacgcggcacaatatgaatcaccgcgccaggcggcagcgggtcatgcaggctggttgtcagggtatcagccgtaacatcgtctccggctatgcgtacctgataccagccgtcgttcagtttctgccggagaccgggcaactgtaccgccagtgcccggacagcttcagcaccactggctacctgcaggctgacgcggcggcaaaatcgttgcagatccccgtaaaggcagatgcgcgccatgcccggtgtcgccagatggagtgcgtgcgtcgttgccatttgtcggtatacctctcacgtttactcagttgttcaggaatatggtgcagcagctctccgtcgccgcagtaaatcgctgcgtggttcggaacggaggagccaaagcagcaaatcaacacgtcgccgggctgcgcactggctgcgctgacacggtaaaaccccgtcgtctccagattatccagatagagattgtcaccatgccgccaccagtcgtcgtcccggtgaaaatccggcatatcaatccccgccagatgataggcatcacggaacagcgtgtaacagtcaaaaaccccatgtttataatgccgtccggtcaggtgtggcacacagcggaatttatgtacctggccggcgcataccagccaccacggcaggtcgctttgaacctgcagcctgcggtccacatcgctcagatacggctggccgccaggatggctgtgaaccagcgccacaatatccccctgcgtttcagccctcagccagtcctccggcgccatacggaaataatcctccggcgcggcagaaatattcacacaggggagataccgttctcccgcctgtgttctcaccacgaagccgcacgactccgcaggcgcacaccgtcgggcgtgcgccagaatatcctgttctttcatgatgatttactgtgaaagtttattaatggagaggaaaccgccaaagtttccggtattgttacgcagggcgcatccccgggcgcagcggctgcaggcatcttttgccggatcggcggtagggttatcaaattcatctgcgacagctggtcccgtataaccgcattcgtcagagcggtatatccatgtacaggtattggccagcataattcgcccggggaagacacatccgtccgtttcagtcggtgttgccaggacaaatgtcgcacttaccgccgtcagatcactgcactgctcgatcacccatcggcttacggattcctgctccgggtcagcctcctggttgccgttttgaaaattcacggcatcgagaaaccgggcatatactatcctgcggatgaccgtcgccccaaccaggctatgcaaatcctccaccattccggtcaccataccgtaaagattggataccttcagtgacgggcgcgcagctgcgcctttgccgttcatttcaaatccgcaaccgtctacaggataaacgtcatatttccgtccctgccaggtaaccgcctcccccttttcatttgcctcgttacaaaaaaaataacgatcaccgccagactgtgtcagatcgatttcccacaaagtgatcctggcggactgcgccagtttagcggattcgttcagcgtatcctgcgaaatgtcctgcatcactcctcctcagataacaacctgttcaaaagtcgtggtcacagtcacccaaagagagccaacgttaatcgaccatttgcggcaaatcacccgaatttgtgtccaggtataaggcggcgtccagagaaaggatttcactccaccgtggcgggataaaaatgcctcaaggttctgatgttctcccttacgaatccggaccgttacgttatacttcgccagatggttgttcagcccggctggacgccgttgttcatacccgtcacccagttttatggaggtgacttttggttctgattccactgtcatatcagggcggatcttccagttaaatgtttccattgttatcgccctcctccagcaatacccccgtcacgcgactgctgttgccagaaatcaatggcggctttttttccaatgttatatacggcctgtaatgcctgcggaccaatctgtccgttgccggcgtcgttgtggatttcaatgttgtactcaggcgcaaacatcgccatccctcctgaaccggctgccacgacacccagcttaccgtcagcaccacgacgaagtggtaatattgcctccggtcctgcctcgcccatcaccccggcacctttggcaaaagcaaaaaatgtcgggcgattaacaatgctgccgctgtactggctgagtcctgccgaacggtacacgccgccgtccgcattcggaataaccgacagcgccgcagaactgtatgcccctgatggtgtactgccgcctgccgatgtgccaaagccgaacattgccagcactgaacccaacagtttagaagccgcaatacgtgcctccatttttgcaaggtcagccaggatggagaccgtcaggctccggaaactgccctttccggtcacggcaaaattcgcgatactgtccgccatgccgttaaatgcgtttgtgaaaacgttctccgtcatgcctgccacattgccgccctgcgccagaaagttatccagcgcccgcgacgcccccagcgtccagtctccctgcgcagcgtcaactttcgcattgtaatccgcccactcagccagccggcgatcgagactgcccttcagcgcctgctccgcctgacgatattcgtcagaaccgtatgtcccttttgccttgctgtcgcgtttaagctgctccagttgttcctggtagtgctgctgaattttcagacgctcttcgtatcggccacgttgctgatcgcccatacccattgtggccagcgccattgcgtgctgttgcctgacgcgggattcttcgtcagcgagctggctggtcaatgtgagcgtctttttcttcagttcattaagggcattctggtgttgcaaatcctgttgtgagatatccagcttctgtagcgcaagcgcaatttcatccttatgtgccagtacgctttgttcatccgccgtcagttttttaccggacaaatcagcgatgcgctgctgaaatgacaaaagctgcttatgcgcttccgtcattttttcggtcgtggaaagcttcgcggcggtaatctgcccttcagtctgcgcctgttgctggctgtactgcaaaagcagtcgcctggcctcgtcgttgtggtaagtctttggctttttcgcctgttgtgacaacgcctttttatgacgttcattttcgcgctccagtgcggcattgcgtacagcagcatcggcatactgcatggcggtaatgcgcgccacctcccgttggtgccgcagggattcagtttcattatcccggttcagcgcggcgttctgctcgttccgacgtttctgcgtttcctgataattacgctctgcctgcgccttcgcatccagcaggtccttctggcgtttctgttcctgaagttcgttcagctgctgctgatcgtattcagtctgggaagaagacaccgtccagggcgtttttctgtcgcgcgcgattttttcctgcagtgtcgcgatcttttcatcgagcgtgtcttcccgcccgatatccagcatccgatcccatgcccacttcgccgcatcaccgacagcattccatgctctttcaatccagcccagattgtcgtgtacgtcccccatccgcttattcatttcttccgaatacgcggacatggcaattttcgcggcatcagccactcttccctgctcgcccagtaccctgatttgttcaagctgggtggctgtcagaaaatgcagtgtcctgtccagttctttcgccgcattcaccggatcatcccgcaggcgtttaaactggcggatggtttcatccactgattgtcccacgttttcctgcattctggtcgcggtacgggataccattgccattgcctgcccggtaaacgctccgctaccgaccacctgtgccagcacgcctgcagcatcgtgctgcgtgacgccatttccggcgagcgacttcgccatcgcattaagctggcctgtggtttttccggcataactcccggtcagaataagctgtttattgaacgtctcgctttccttagcgccttcatagtaggccttgcccagcccgtaaacagcagcagccacgccgccagccagcccgccgagcatcatgcccttcggagacatcagttgctcgatccacccggcgcggttagcgagcgtgataccacttccccgcagtgccccgaaattcccacgggccagctcaccagccagcacgcccagttcacgacgggcagcagcgcttttcagtcctagcgtatgggtggcagttccggtacgctccagtttacggatataaatatctgcggcgctactgacacccagttcagccgccttcacccgcagcagctcggtacgggagaggccctgtaccgtcgtctgctctttcaggcggcgtataaactgtgcttttttctgcgtggccagcgcttcggcatcggtaagctcacgggtcttcctggcggtttcagacaccagcgccagataatcgccctgtgagatatctccgcgtcctttcgcctgtcgtacctgcgcctggatacgctgcagctcctgcagaccaccgcttaactgttttacactgtcaatctggcggtaaaaagcagcacttgtcctgtcctgtgctgccgccacagccgctgactgcgcctgttcctcacgcagtttccttcccagtgcctccacccgctgtcgcgtctgatccacatccgccgccagacgcgtactggccgctgcgcttttctccacagcggaactgtacgcggtactgctggcagtcacttgctccagactggcggacgtccggcgcgtcgcctccgtctgcttatccagaaaacgctgcatccgggccgctgaacgttctgagtcaccagccgcatcgttcagcaattttttaatgcgcggaacttcgtttcggaactctgcgctgtcgatacttaaatcaatgaccaggttcgctatctggtccatagcggacacctccggtaataccttcgcccaggatcatcagttcatcatccgttttttcgtgcaacgactcaggatcagtgatcaggctgaacatttctgcatcgtgatgcgtgcctgtaaccagtccggaaatcagcgatttcagcgttgcaaactccgcatccagcaacatgtcactgaagctgttcttcccgaaatgctccgcccactcacccagctctgtcgcactcatttccgccagcatctgccgccagtctggtcgccggaactcacgcgcgagccgcatcacaaacgccagctcccggttcaggacttttccggcgtggtcgtgtccttttcactcccgctgtcgtcttcctgcgatgccggaagacgcataccactcagggacagaaccatatcagcgccacgtcccagcgcctcataagaccattccagtctgacggactcatacagggcgcgggcctcctcctcttttttgctttcacacagggagcgggataccagccatgcattaatatccacccccatctgcataaattctgtctgacgctctgcttccgtcagggtttcaggctgtgcgtcatagtctgccgtccgctgctgaataaacttcagataatccacacgttgcagggcagaaagctcactgagcacgatggaatgcccaccgtagttaaaggtgtctgtattgagaaacatgatgattttccatagaagccccggaaccggggcggactgataagagagggttatgacgccgtcactgtcactgctgccaccgcgacaagactgccgtcactgctgataccaacaatattcacgctgcccgccttcacgcctttaaccgtggccacattatccttcagcgtgacggtggcgatcagcggatcggcggtcgcaacctgcagcgttttatctgacgcgttatcaggttttaccgtaaatgtcagcgtggtggtggctccggcagccaccgtggcactggccggcgcaacggtcacgccggatacgctgactacgtcaggtgtatcctcctccgcaagagaaggacgcccgacgccggtgatttttacgctgcgtgtcatcacctctttggacgtcacggttttacccagtgaactcagccagccgcggaacacatcaaccgtcccgttaggatacctgatacggaaggcgcgaacttcgccggtgtcaaacagctcaaccagttttttctgtccggtctcaccgggtttccaggccagcgtggccgtggtgtcaccgacgcttttctgcccctgcgtagtgcttttccagtcggcattttcatcatcaagatagtcatcgtcttccgcatctgcactcatttctccgggctgcagatccttaatacctgccagtcgcagccagtcatcatcagccagtggatttttaaacgcatcgccgctgccggtatacagccagaatgtggttccggcgcctttcgtttttaccagtgggtttggtgttcccatcatatcctcctcagttggtataggtgatccggtaagtaatttctgccatcccccacgttgccatttcgctgtcacgctggtagtcataacccagcggggtcatggtatcgataaggcgctccagaccactaacctcttccagcgcaggaaagattttttcttccatccagatatcaagctctgtatcaggagcctgagccctcagaaaaactgccgtatggagagtagcctgccagtcatcctcatcggtcataaggcctgtatactgtgcgtctgtcagccagacagctattgcgggtaaatcttcctgttctacgaaagcaggaagtccatcaaaaagagtgacaggtgcgccagtcacggattccagcttttccagaacggcccggcggattaatgtgtgtttgctcatcagaatgcctcctttcctccccggcctgaaggccggggaggaaaggaggcggttttccggctaactgtcttttgcataatcacattttcctctttaatatgtgaagccatgaaacgcgcatataaataccggttttaccccacgactgagcaggctgagcttttagctcagacgttcggttgtgtgcgtttcgtctacaactccatcctccgctggcgtaccgatgcgtactacgagcgaaaggaaaagatcggttacctacaggccaacgctcgccttacggcgctgaaaaaggagccagaatttgcctggcttaacgacgtttcctgcgttcccctccagcagtctttgcgccaccaacaaaccgcctttgctaacttcttcgccggacgggctgcatatccggctttcaaaagcaaacggcacaagcaggcggctgagttcactgcgagcgcgtttaaataccgcgacggcaagctgtacatggcaaagaacaaaatccccttagacgtgcgctggagtcgtccgctgccgtccgtgccgtctaccgtcaccatttccaaagatgccgcagggcggtactttgtttcgtgcctttgcgaatttgaacccgcatcactgccgatcacctcttcaatggtcggcattgatgttggtttaaaagatttgttcgtcaccgataccggattcaggtccggcaatccccgccataccgctaaatacgcggctcgcctggcactactccagcgccggttaagcaaaaaggccaaaggctcaaagaaccgcgccaaagcccgtttaaaggtagcccgactccacgcgaaaattgctgattgccgactggatgccctgcacaaggccacccgcaaactgattaacgataaccaagttgtatgcgtcgaatccctgaaagtgaggaacatgatccgcaacccgtcgctatccaaagcaatagcagacgcgagctggggcgaacttgtgcgccagctccggtacaaaggcgaatgggcggggcggtcagtggtagccattgaccagtttttcccgtcctcaaaacgctgtagctgttgcggtttcatcatgaaaaaaatgcctcttgatgttcgtaaatggcagtgccctgagtgcggaactgaccacgaccgggacgttaacgcggcacgtaatatcaaagctgccgggctggcagtgttagcccacggagagcctgtaaatcctgaatcgctcaaagcggcttagattcggctcgttgaagtgggaatccccgtccttcagggcggggagcagtcaacgtgaaagataaagcctcagttgttgtttcagggcataccccagttgcttcggtatttcctcgtcaatcaagctttgtgtggcgctttcgaatgcctgagtcaatggtccggaaagaggaattttcactacatcgattggataacggtttttcccgttaacgcgtcgcataacatgccagcgtccgttagccagttgctgaataaaggcatcccggaacagatatggcccgattttaagcacacttccgcgatacagcagtttgcccctccgtttgctcatcctgacctgtgcagcgcccaactttatggcgggaaggtttccccggttaatccgtatccgggcagagcgtttaccgtctgtaccggctttaaataacctcaccctctggcgaaccagcttcagcggaagtcctcttacctggttatctccggcgacagtctcccgcgccaccttacgggttgccactgaaacagctttctgcgccacgcgattcacagcccagatactggcccggggaaccatctgtcggtcaaggctgttcagattccggatcgcattttcaagccctttcatcagaatgcctccgggaaaccccggcctttaggccggggagcagtcaaacattcctcccgtcctgcgccggttatccgtcggcggcgtccccctgcccagcagaataatactgctgtctccaccagccggagtgatgcgatccacccagaaggtgtcaccgagaatggttagtgtgtccgggcgcttcagatggactgtcagggatgttttgacaaaaaatgtaggcttgtccccctcaatccggacacctccggcggcatacgacacactttcaggatcgtcaaatacgcccgtaagcgtggcccctgccagaacgccggaggttattgttgctaccgttcccatcacccggaggatggcatcatcagcctgagaaatcgcggtatcaaacaggttttcggactgcgacatatcgccacccttacagttcaataataagtcctgcagcaatcagctcgtccacatcgtgttgcgaaatacgcgccgggtttcccgccataaccatatccagttcccggttactgtccggatcgatggcgcagatgtgtagtgtacgaagcgccctgataagtacccgttcggatctttgcccgatcccgggcggcactatggattcatcactgtcattttccacagcaggcaaatgctccgcctccgctccgcttcctcttcccattccatgacacgctggctgagttcagcggcgctcccggacacatccggatcacgaccaagccgcgtcgcaagctcccgcagacgctgtatattctcttcttttgttgccataaaagatcctcccgcaatttgtaacaataaaggcctgaatcaggccttttgggatgcttaaccgacagtgacaatgacaaactcatccgggtccggcaggaccatcagcggcgcagactgcgtcatggtatattcattcgccgggtcccccaccgtcagccagtgtttgggataacgggtggcggcaacaataccctccgcgagcgcctgtgaatcctgaatggcaccatagcagcggataccttctgccgccgtatttcccagaaccagagtcccttcaggcaggtaacgcttttcggtcccgttatcagcaacataggatgttttagccaccacaatggccaaatctccgtaataccccttgaacgacaccacagccccaaggtccttcaccgccgtttccagctgagaatttgaaccgcggcgtgtatccagtttttcacggaacagcttaaaaccgttcagcagacgccagactttcccgtccatcacggcaatattgatcagaccggatgcctggtcgcagtacatatccagatcataagtcgggtcaaaggtttccctgtcctgctctgaccattttttacctgtggcctgaataatgttattcccggcggagcgaccaaaatccacctccacggtgtcaaactgctcgccctgcatggtgtatttcccgttcagcaccgcactgacggcctgcatctcctccacctggacgatggccttctcttcctgcttcaggttatcggtcagaatgcgcagacgacggtaggccggatcgttaagcctggccgggtcttcacccggcagacgctcaacaacctgcgcatagttaacttcatgcttcggtttgacataccccggacgcagtacgcgcgtttccccgccgcggttacgcagaaccttccctccaaccaccggagatacataagcggcaatcggtgtttttccggtaattttgtccagcatgacttcctgggtaggaaatgtcacagtacggcgaaaaaacaggctcaggaagagtgggttaaatttaactttctgctcggtataacccagcaactggcgggtggtaaacaatcccataaatggtgtcctccggacgttaaatacgataaaggccgcttcgcggccttcttattacggtaaagcggcgtgactgacggcgcttccggcgaatgcatttgcctgcttaatggcatccacactcttcggccatgccagtgattctgtggcaaaggtgccgctcttccagtacgtcagcaggttttccgacccgtccagctcaagggccagaaccccgaccgccgttccggccttctgcccgtcccaggccaccagtttcccggtggtatcatccagcatcaggggcgtcagcatcggtgtggccgccgttatcccgctgactcccgttgcggtatgtgccggatcgttaccggcgaaaatgcggttatccgcacgtttctcaatagtggtggtaaatgacatgctgtctccttatcaggtggctgaagtaccgggaatactcatcaacaacgtcgtttcggtatcattactgtggtctttaccgccggatatggggcccggggaatgagactgcatgaaagcatcaaatgcgttgttcatgctcagccccgcattaccggatttgtccggcgcggcagccagcaggtcacgggcctgatctgtggtcataccaggcatgacagccagtttttccgccaactcttcacggcctttcgcctcatcaagcgccatcacggcatcatgaagtgacgttgccgcagcgatcggcgatgctgccagaatggttctggcctgttccaccgtcatctccggcatggccgccagtgtctgtgcgagtgtttcccgaccaccagcttcttccagggcaaggatacggtcagcggtgctggtcgtatccgccggcgcggcggcagccagaatagacttcgcctgagcaacgctcattcccggctgcccggccagcatctgtgccagtgcctcatgccccctggcctccgggcaacccagaattcccattacgcgctggttttcctgcgtgacagcgtcagctgcacttaattcaggcatagtgcctcctgtcttgttactgttgatagcttctgccatcacgccgatggcgtcagcagcattcaccattccatctgccagtccggtagtgataatggcctgcccgtcatacactgccgcctccgtcgccattaccgcatcgacagacaaccccgtgtaccgggccactttttctgcaaacatctttctggcctcgtccattcgctgctggtagtcggcatggacgctttccggtaatttctggctgggcgtcagatcagccttgtgtgcgccagaatagataagggtgatatcgatcccttcctgtttcagtttttcggcgtagctggtatgcgccatcaccacaccaattgatcccattctggacgtctgggtcacaaggcggtgcgaacaggctgccgccagcaacatggccgccgaacaggctgtttcatttgccagtgcccagacaggtttctgttcgcgcatccggcaaatcatgtcagcacagtcaaacgccccggcagcctgaccgcctggactgtcaatatccagcagaatgccttttacctccggatctgaaaccgcctgttgtagccgggcagtgataccgtcatagccggtcatccctgaaaagggacgcattccgccgagtttatgaaccagtgttccggtcacgggtaataccgcaataccgttcactacctgataaaaacgtgcctgcggctttccggtcgccataaaatcgcctgtgaccagtgccatatccgactgatccagactttcgttattaccgggaatgtgcaggctgttaatgcctgactccctgcccagcgcgcaaaagaaaacccgcgcataggcgggttcaagcagcaacggagcactggttgcctggctgatgatgtgcgggagattacgttgcacgcttttcctcctccgtctgacggctcgccgcgatctgttgttgataggtatcggtgatccataccggacgcgaaagtccggctgcccgccgttcttcggattccctgacctgctggcggaatatctcctggtaatcctcgcccataatggcgagttctttttcataggtactcagcccggcctcaatacgcatcacggattcctgaacctccttgagtccgtcaatcgccatacgtccggcaccaatccactccgagcggctccagctggatcgggcctcccagaaggaaaacctggcccggggtgcccggataactccccgtatcagcgcctcctccagccagcaggaaaacatttgtgtcgccagccgtccggcaatgaaccggcgccgccccaggaaatagcgccaggactcattggcagatgcgcgggcgctggaatagctgacctgagaataatcacgcgaaagctgctcataagagacccccagcccggcggcaatataccggagcagcgcctgctccagcgctgaaaagccattatcggaatcctgcgcagtctgcagattcagctcatcacccgggtacaggtggggaatttttacaccgcccagtttgatactgttggtactgtaatagcgggcataatttgccagcatgttaacaaggggcgtatctttgttatctgccgccgtgatgtattcaaaggctttctcggaatcgagttcgctttcgatcgtggcggcgtacatggctttgacaatcgcggactgaagctgcgttgcctgcagggtatcaagcatcttcagccgctccatcacactgtaaaactgattggcaccgcgcgtctgtccgtcctcaaccggctcgaaaatatgtaacatcgcgggtcgtccggacggcagaaaacgaggaatacgggtccagcgttccccaccagccaccggccagtcatcatcacagacatgataggcgagggcttttccattccggtccgtttccactcctgcgcgaagctggcggtttccgcgggcataccccggcgtgtccacccgtttcggactgacagccttgaatcgggtacggaaaacctgcgtggtttcagcgtcccagacaggctggagaaaaatttcaccattaaaggcgtgaacgcccacgccttcacggatgaactctgtaaaagtacgcttcccctcggcatccatttcgccaaaaataccatcgcaatattctgtccatgcagcttcaacctcatccacaaaactcttcgctgcgctctcacgcataccaagatagcgccagtttggacgatagctgataagaaacaggtgtccgacaatatgatccttgtgcagcgccaccgcatttgctgcaataccattattacggaccagatcatcagcccgcgcattgccgaggcgcaacgaaggcagcagcgcggcatccacgctttccgccgggggcatccagtcagccatctgtccgccgaaaccgatccccccgccggtgtatcccagactttcccgcagcggcgtgccgtgaacatccaccagaaccggggtgcgcttcacagtctcacccccacaggtgcccggcggcgaccattgcacagtgacgcctcaagttccgcgacatattttttcagatcccctaccgatgtcgcggtaaattcaacccgtcgcccgtctttctgaaccgtcgccacccgttttcccgtcatcaggtcatgcagcgcgacgcgggcttcctgtagctcagtgattgttgccattaactcctcctgccagcattgcggccagttgttcaagtgtcggggtatcctgctcttcgcttttccttgatgtcgccagcgcctccagatccagttgccagcgctgcacagacacccgtaacgctgcactggcatagacaagacaatccagcgcttcgttacgacgtcctttggcatcccataacagccggaattttccgttaaccagtttctccaccagctcttcggctaccagttgcttcgcttccacctccgtaaaaacatccggattatccggaaagcggatcgcataaggcgtggcttcgtcggcaggcgcagtaaccgcccccattctggcgtaaagcatttctttggcagtatcagtaccgatttcgcacaggaataccccgctctggttgcgttttttaggcatggtaataacgggttttccgtaaacggaggcccctttgacaggcagcacgcggaaaatgccgtgtttttttgagcgtttatagacgatttctgcatcgataccgccgatatcccagcagatacgggaaatggaaatatccgtcccgtcagcatgacgatattttttattaatgacggcatccacacgctgcagggtatcttcatcatcatgccgtcccatgataatttgcttatcaataaggaaagcctcttcgcccggcgcccagccccagacatacatttcataacggttacgctgggagtcgataccagcggtcagatacaccacccgctccggaaccggcgccgcataatgaatcactttttccagcaaaagctcatggctgagtttttcggccaccgcctcttcataaggctcgcccaacgtggtgtttataaaggttttcacaccatttggatctttcagcgcatccagccagtcataaataatctgtatccaggtggtaaagggactgtaagccgtccagatatgaaaggtaatggatcgtggcggcggaacctcctcaccggacgcgctgaaataagccagtccatcgcgtgtccacatgcctgtgttatcgcaaatccagcggcctgctttctgatcaagttccgattgacggatcacgcatccattatgttcacaaaggtaatacaccgtctccggcttgcttttctcccatttcagaccgaacggcgtactgccatcaccgaatttaaggtactgttcttcgccacaatgcggacacggtacataaaaacgcataaaatgcgccgattcatttgccgccttttcaatctggcatgaccctttgacttttggtgtggagccccgaatggatttaggccagacagaaccttcaatacgtttatcccccagcagcgtcggcgaaccttctttctcgacatccggctcaaaagatgacaattcgtcatagcagaccacatccaccgatttttcacggtagtttttggctgctgcaccgccgaggcaccagaacccgacaccggaagaaaagcgtttcagggtaagcgtgttatcacgatgtttacgcccgaaccagggggccagctccagcaatacaggaacatccctgatagtcggctccacgtgggatttcataaaatcctcagcggatgagtcggtcggctggaacagcaggctgttgcgcgacttgtgctctatgaaatagccttccacccccagcaacattttggtatagcccacgcgggcagacttaatgaggtttacaacgcggatcagttcataccccatcgcgttcattatcgctacctgaaacggcagcgtttcccatttgccgggggtgtaggaggactcttttggcagatagtaatactcatcagcccactgcacggtggtaagcggtacgggaatatgaagcgctatcagcccgttagttatggctctgttggcattattcgccctgcgctctccggaaatcatcggtccacttctccacatccgctatcgtggcggccctgcctgacgccctggcgatttccgttctgaccacatcgatgtgcgactggcacagatcaggatatttgcgctgtaataccagcggtacccttgacagtatccctgctatttcctgagccacccgttgcaggatgtaggtgaacagttcggtctcaagaaccagcccttcgcgctcagcatttttaagttcctgcgcatccgcctgggcttttgtcaggcggtagcgctcatagtcgatggtgccgggattaagatctgattccgcagcggcacgtaaatcatcaacctctttacgcagcttttcattttcaatagacgcatcacgctccgcgtaccatgaaatcgctgccgcggtgtcgaacactgcttcgttaccttttcctcctccggaaacaagtggcagcccctggctttgccaggctgtgacagttctgacgtcacaaccaaaaatttcagccagtttttttttattcacgttcatggaaaagtctcccggaaacaggaaaggatctgcgatcttcgtttttaactaaaaacgttatccagcagatcctttctttttttctaaaaaaacctttaaaaacaggaaataaacaataagaagaacggatctggcttttctctgaaaattttcataaggagtgaaatcctgcgacgctgccgccccgtaacaggcagaattcccggaaaggaccctggaaaaaaccgaacagttattgttacaatataacaattaatcattttaacgctgactgagggtcttacatatgaaattcaagagtattgctaaaactgtttttctttttgcactgctaacctcagctggctttgcaactggtaaaaacgtgaatgtcgaattcgataaaggacaaaatagcgcccgctattccggcgtaataaagggatacgattacgatacatataacttccaggccagaaaggggcagaaagtacatgtaagtatttcgaatgaaggcgcagatacctacctgttcgggccaggaattagcgattccgttgacctgtccagatattcatctgaactggatggcaatggccagtacacgctaccggcgtccggaaaatacgaactgaaagtacttcagacacgtaatgaagctcgtaaaaacaaagcgaaaaaatacagcgtcaatattcagataaaataaatgccagcctggtcagggggttcgttccaacaccaaacttttcagccactgggttatttcatgaggtgtaccagtttttagcgtctggttacgtttttgaggtgtacgaaaactggcttatatcagtacgataaaaacgcgatgtggtagtacgcagacccagagacattgtcatgtttatgcatttctgaaactcccccgcaggtaagctccttttccctcctgcgggaattttttatttgcactgcgtccggatgtactcctgcaaatacttcagtttttcctgatcgctgatgattccggcgcggatatcgagaacgttttgtccagcaactggagagagttcgacggtggcagcattgcccacgcggcgggtactggcggttttggttgtggttgtggttggcactgtacagcgtccttcgacacgcacccggctaccagcagcaaggcggcgctgcaaatcagtattcctgttttgtgcatcagctagttcctttgtgtattttgcatcgagggcggcaacgtcacgctggcgcttcgtcatatcggtaattgtctcgttcgccagcttcaggttgtgagtagcagtatcacgctggtacttgtaagtgatagcgttattgcggtagtgatttgccagccgaccggcaacaattagcgagacgagcaacaggccaacaaacatcgttttccagttgaacatcatgacaggaacagagcacgctccgcctcacgccgacgggtaagcccgttcagtaccttgctaccagccttattccagcgcaggaactcatcagcggcgccagcgtaatcaccagcgtttagcttccgcagcagagttgatgtggataatgtccgggcgccgaggttgtacgcgaacgacaccagcgcatcaaactggccttgcgtcaacttgaccttaaccagtctggacacatcattttcataaccgactaaaccagttttaagcaagcgctcggcagtagcctcgtcaatcatcattccgggcttaactggcttaccgtcaacagagtgggtccagccataaccaatcgtccagggatctccccccgttcccgggtccggataagctttcaggctacaaccttcaaactctttgattagggtaatgcctttttcactgattctcatcattaacccctgcacgttttttgagtgcgctaattgcgatttcgcgcagcttgtccacaccgacaaagccaataattccgccaacgaaaggcgaaatggaaaccggcaggcctaccacatcaagcgcactggtgacacataaggaaagagcgccacacaggacgccctcaagccatttatttttacgggtggcgccgtcgtatatcagtcggccgtaggcaatgagtccggccattaacgccccaagtatctggggccacgcatttttgagtccggtcaaaaccgcagcccagaattcaggagtcttgtcattcattttcataagcctcacctccgatgatttcggatggtaactagagtgagtgaaatggttgggttgcagggtttaatatcttgtaaaacaggattgcctgtggttgcagaatctgaaagtaaaatcacgcagagtacaattttaatggaggtgaggcacaaatactgcaaatttagcttttagcttaattgattgcgtgctgagtgaattctgtttgacaaaaacatgctatttatagaatgttaattccatgtaataaaaaggatgtgtaactcatcatgccagcaggaattaaaccaatatttatcaataatatgatgtcaatatatggattatcccatcctcatgacagcaaggtatttccagaccttccagaacaccaagataatccttcgcaattacgcctccaacatgatggtcttgctaccgatgataaagccaggctggaaccaatgtgtcttgctgaataccttatctctggaccaggaggaatggaccctgatatcgaaattgatgatgatacctatgatgaatgccgtgaggtactatcacgcatacttgaagatgcatacactcaaagcgggacattccgcagactgatgaattatgcctacgaccaggaattgcatgatgtagaacaacgctggttgctgggagccggagaaaactttggtactaccgtaactgatgaagacctggagagttcagaaggcagaaaagtgattgccctcaacctggatgatacagacgatgattcaataccagagtgttatgaaagtaatgatggcccacaaccatttgatacaacacgctcatttattcatgaagtagtacacgcgttgactcaccttcaggacaaagaagataacaatccaagaggcccggtagtcgagtataccaatatcattttaaaagagatgggtcacacatcaccaccaagaatcgcctacgaatctagtaattgacactcatcaaaaaatgcaaaatcccacgatgctacaacacagtaaccagttcaggtcagcagtccatagacactggctcctgtcaggatgccacctgctaacccagtaccggaaatcggatcggacattcatccccctctggttgtgtgggtcctctcagttatgaggggaaataaaaaaggccgccgaatggcagcctcaaatggaatatgtattaaattggaggttctaacggtcccgccagaatctcagcctctccgttgtgacaaatgtcatcgccctgcgtcagatgccagacaccaataatagtctgaccagtttccaggtcctcggttacgccgtgggtgtagtaagcaacctgaaccctgccgttgtgctgtatccagtagaagccttctttcattctaatctctcctcttcttaagaggagtttagctattgggattgcaggttggcgttagaaatactaaatcatcaatgaagtatttctctggtccgccatcgaggattcgaaccccgaaccacagaggtagaagctccgtgctctttccagttgagctaatggcggaaaaaattgaccagtgaagtccactggtcatgggtcatgcagttgtctctgcgaaacgggtgtatccccacccagtgttttcagtatcgagagcattatcaaatgccatattaactatagcatcgcagaaaaaagtcatactgataattcccaatgacgcacttctgaaaggctctatggttgtattgcgttgtacatagcgcaaaaaataccgattggcagacttagaaatggaaaaccccgcacgatggcgaggcttgaatttgtttggtcgacgattgaagctatggcgacgatatcagatttacataaaatatagccgttttaatccagttttgcaatcaccacgtcgccagcttctcagcaagcaaatcccttttaatgactatccagccgctatcgcgtaatccgctcaatatctgctctacttttccaacgaacatgtctggaccaacctgccgaatgtctttgacgttaccatcgcggatcttaatcagaaggtcgatgttaagcatgtcgacggcaggctgaacctggcgtgttggcgatggtagtgtctgactgaaatagcaatcctccagtttttcgaacacctcccaagcctgatctgtttcgagcatcttggcgtggcgggcagcgccgcgttctgtccagaggattagggaacgggcatttttaccaactaacccgattgtttcgggtctgttcttgaactcgcgtaattcgtttttttcaattttaaaaaaatgctttcctacaacgaatcgcgtggtgttgttcagaaagttatcagaaatgtttttgatttttgtgccgtataagtgcgccaaaagttcggtagtaataacgggaatttggttatgggtaatcggggaaagagtttcgacagagatttgagtggtcataatgacgccctccggtgattgttttgtttatcaccaccgccgacgccaatcggattgggtggtgagacgtacagggttggcgtaaccggatcaccgaccggcgagcctttcggctcccccatacgccccaccataattcaaatgcgcgtatacaaacgacaataaaaaacacgctcgcggcgtgtctctgtcgcggtgaaattccgggacgccaatcccgacgccagattttgctggcgtactgggaatatagccccggataactgtttgtgtcaattaagtgcgtataggttgaaagccacctgttccgaacgcgactccgatacactcaaaagagacgcctgatcaagacgcagaaatatcgcgcgcatggtcagccagtgtctggtgaaggtttctgaccagttcttttcgctaacgcctaccagtcccgctaactctttatattgataaacctcacgcccggctaattcagatttgacatcctgtgccgccagccagattaatgcccggagtcgttcctgtgttttaccggccatcttctttccgtcgagttgcgccgcaaacgcactccagccccactgtgttatttcgacctggtgttcccagcaggtattctcactgtaattccacaacaaccacgccttgtagtgttcatcgagtgaaagaaccgcccggcgccatgaggcagtggaatattccacaggcttcaccagcgggatagcgcttcctttcgccagcgactgcttgccggggattggcgggttatttaacgttatccagctttctgtttcctcgtcccagatacgctgtttttttcggggatagtttttcgtgtcgaattgcgcgttctccagccaggccaaaagctgccctttagtctccccgcttaaatcggctgtcgctaccattagctgctcacgtacatactggaggtattgagtgttcattgagtaaatcctgtgaactgataaatacgaacaaaattgcgcaggatgcggtagtcaaccaacaccgaccccggacggcggtatatgcggaggcgctgccagcgcatgcggaggatctcgatcagttctggtttcatgcggcctccagcttttttagcgcacgcagatccgccagagccgcgagcctgatttccttcagctcctcgaccgtccagcggtgcggggtgttattgttctcgagtgccagcaccgccgcctcaccgtaacgctcaaccagcgcggtacgatatgcttcgatgttccctgatttgtagacgttgcagacatcacactgaagatggatgttgaagcgagtaaagcgcagatgcccggcggcggccgtactcctgtaatggcctgcatgccatgcgaacgccgtcttcgttccacaggagatgcaaccgagtccttctgccagttcggtttcacggcaaatgtcatttacggcgcgctgcgtcaagtcaatccagtgcttcagcggcttaaccgcggctttccgctggcgccaggcggcgcgttcttttttctcagcggcgcgctgaagggattgcgccttacgttgcgcggcttcgcgagcttttctggtttgttctttgccgacggcgctggcacactggtacgagcaaacgatctgcccctcgcgtatcgggtgaaaccactggcggcattctttgtttgcgcacttacggcgcggtaatttagccatgctcacccccagaccttttggcgtaaggattttggcgtccgcacccggtgtgcatattcaggtaatttcgcgctgacagtccaggtaatgaagtcagggttcaggctctttcctgtccttatgccccgcttctgataatccgatatcagcgtgtcggcctgctcggttgtgcagtcatgatgatggaaccaggagtatttcatcgccatcaccccgcccagctcatgagctgggcggcggcgttctcggcctcgcgctgagtacggaatgtacgtgataaaatccagcgccagagaacatcaagcgcggatttatacaactgctgaaattcgacctcatccatgctggaaaaagcgatgctgcggggatgtttgcgaagggtgccgtccggtaactggatggcgtcatagtgaccagcctcaaccgtcacccatgcgcggtaggcatcgaatgatttacacaggctaatcccgtttgttacccggcggtttgcaatctgttccagatactgttcagccgcatccagtaatgcgctttcattcccgccatatgcagcgagaaactttgcataaccgtttaccagtttgcgctcattggcagaaatggcgccgccggtaggttcccagtattcaaacccaagattaagcaacgcgaaaaagcggcgatggaatgcaggattcctcacctgacggaactcagccaccagcacggcgccgagtttgatttttgattgcagaatatcactggtctccggcgttgcggggatcagaattccagatgactgcttgatgagttgtaattcgtgcgccatggtattctccgtggcgcagaaggttaacggttgttcaggccgttgatttcatattatcagaaggtggtgttacccggtagccgagacgacgaataaaatgcataaaaccgttgggagtaaaaacttcttcatcatccagcaaaggacgcatagataccatgccatttacacgatagataagatgcctgcctgatgatggaaagctaaacaccacgcagccatcagatcttcttacaatgtcataccagctatcttctgacttttgcaaagctgaattactcaatttttgttctcccttcaggcgatgtacagacgcggttaaaaattgtcggcagcagcatcaaagggatacgcaaattgcggtattctgaaaaatgcgcgccagcattaagcgcaatgttaataaaaccagtcgtcagcgctttcccacgtttcctgcaggatgctctgtatacgttttttatcgccatcagcagcaccgacgatactcagaccatcctgactgcctcgacggatggttaagttgcagttttcatactgattctggagacgggtaattaattctttttcaagtgcaggaacggcaccttccggaagctgttttgtccggctgataacaagttcaattctcataattccctctacatttaactactgtatataaacacagtatacctgttagaaagaatattcaagaggtgaatagcactttttgcaaaagctagcatgttgtttcatatcagattttaggcggaaaaacccgccgaagcgggttaaattgtctaaagtttttagactgcaatttcattcggctggcaaagctctggcaagtttgcccttactggcgtctcagcatagagaagctacataacctgctaggagggcttaaacgccatttttgtgctccccattttcagttttccttgccgatgaagctcatttagcagccaaaaagcgcccaagttagagatgcaaaacgccatagcaaccaacttacaaattcgcctccgattatcaggaaagtccttaggaatatcattcataaaggcgatagaacttgctcccaaattagtgatggatgttattagggtgctgtcaattagtgaggcatggttaatatcatcaacggggacactcattatcaaggagtcaatacgctccgcatcttcatcggttattatatactcgattttatgggcatacttattacgaatattgttcatttccgtgaggcatttagccaatgaaacaggaagaccaagtgcgacggcggttttaatcttaggcataaagtatttgtcaacatctacaaacttttcggttccttctcgacggagattttcgattactattgaaagaaagttttcatgtataagattgagtttgattaatgcggccgattcatcaacaaattcagtaatgggaacatacttctgaggatcaagaaagtagcccaaattatggtcgatcgacgttcctgttgactgttcaactctagagtatttcattgaatgctcctgtgatttattgcattagccttaaaaagacattactttcatcattataaagaaatgatataaccaaaatcttaatatgctttgatttagatttggttttattttgttatccatttgctaagcatggcagcgcgacaggcgttccaaccctccacaaatccgcactcatgcattcctataattccgtccgccgtgatttcctccggcactaccggcgctgggtgttttttgatgtgcaagcgaggctcaccatctttcggctcaggccactggcgggacttgtttatctccagcttttccaccatcgcccgggtaatctgtttgtcagtaataccagcacggcgctgcgcatcccataacaggaattgcatatcagccaattcgctgaggtcgccaggttctgcggcagtttccaatgcctcttttgagagatgtttcagcggccctactggaccgacatcgccgaacgtcttatctgaccactcggcgtgctcgcggcgaatacgttcgcgttctgacgctggctgggcggagtagaaatacggtctgatagtccactttttattccagaaatctcgcgttttctcagcttcctcaagcgttgcaacactacagccaacctttccgcactctttgatgacgtggtatccggctggctcttggtatttcagccccacattctccgctaccagcgccgcgcatctggcttccagtgccgctatggtagttacgtgttcagcattacgttctgcaagctgattcatggttaaaccatcagttattccacgttctttcatttggttgctcctgttaaatcagaccggcgtctttgcgttgtttgtatttcgccattaacaactcggctggcgttggaccgcgatcccgcgacggcgcggataaagcgcgacaaacaggcggtatgggtttacctgcaagagctcgcttttcccagtcatgcaggatgtcgccagcggcccggataagttccttttcacttaattgcccctcagttccacggcggcgcagctccaggcagacgtggtaatacagcggatttttatctctccaggggaactgctcactggtcggataacggaaaacaagcttccgccaacgccagtattcgcccatgatgtcgtcaacactgaccccgagtgctccactcccctcacggcaccacgaaataaactgacctggcgacggccagaatggagactggctggaacgggctttctgcattccggcggatagctgcttgcgggtgcggatgccattttctgaaaatgccgctatccactgctgcttagctactcgctcgtcagcatcggagcggagattggtttgcgtcgcggccgggaaaatctgcttcagttgcatgaacagcgcgtcaacaaggcgctcagcgtctgaattcacaacccggccatgctcagggttgcccccggctatgcttgccatcgctgcgccatcccgattgtttattgcgcggtagagttcaggtttcataggaaatccctccatgcatccgggctgttccagtggatactttcctgatcggtatctctgctgcgcttcgcctgtccgtcaggttcgaacagaccctgccagccattcgcaatactgcggttaataatttcttcaggtgtgtatccgttcagcctgcagcggtcaagcaggttgatagcctgcgtcacggtctgctgagacttgatcggctttttcaggtcacggcggtattcaacccatgaagaccagatgatcgaagacagccagtcaggcaactgaacacttgatgcatcgaacgaaaccgcccgggggggtttagggggtttattactattgtctttactgtcttttgtaatagtgtcttttgtgtttacctgatttgggtaatagccgttacctgattcgggtaaacttttcttacctgattcgggtaaacttttcttacctgattcgggtaaacttttcttacctgattcgggtaaatttaccttttccaggtaaggttttttttctgtaccttttacaggtaaagatgaccattcgctgaccgttttattaatcccgataacacgaccggtttgagttaatatcccccgcttaaccagggcgctttttgcagatgagcacttatgagggagaatgccggtcagctccgagagctgctcgttactgacccagtcagatttcttattgaagccgtatgttttgcgcatgacagccatgaacaccaaaagctgatgctgcgacaaacctgcatgcattacagcctcaaggatctcattggcgatgcgcgtaaacccatcatcgagatctgccacgcgcggctccttatgtgccacgtcaggcacaggaaaattgattacttcagcagtgtttgccataattactcctgtgaattgatccagttaattccaccagaaagccgttggtgacccctcaccgcggctttcgcctttttggttgctaccattttcagtcccaccccagcgcatccggcctggctcgttcagcctttagcccggcatcagcgagaatctctacggctgtgagatagtttctggataccagtaccgcctccggtggcgcggcctgaattccaagaaaagccagctctttcgccatgttgcagaaatatccctcagctttacgtctgctgactgtcgactcgctgatgcccatatgctcggcgtaagatttctgacctaccgatgcaagccggttgagcaggacgctctctatttcaatcgggttgatttctggtgggtctaactttcgtgcaattgcgttctccatgggtaaatatcctctatggttgtttggctgatgcctcttggcttggtaatccatctgttgggtttgggtagagatcagggcgcagttcgtgtggggtaacaccagtagcgctgtaaattggaagtactcgatcggcaggaaccactccttgataacgattccgccaatgactgatggtcattgcgcttacttccagtagttcagcaagccgggttgcggttcctgctctggtaatggctttatcaattgctttcatatttgactccagtggcaacagccaaattaaacaaaatgtttatcataatgtcaacattttgaatattgagctaataaacttttggtttagaattgtgttatgaaagaaaaaactcatcagattaatcacccacaagtgcagaggctcaacgagatcctcgaacttaaaaagttgaccaagtcggacatggctcgcatttgcggggtcagtgctcagtcggtcaataactggtttgtgcgcggtacaattgggaaaagctcggcgataaaactggcagacgcgcttggggtgagtcttgagtgggttcttggccaagaggtcgacgagagggacggtttaaaggccgacgaacggagactgctcgaactatatcgccagcttccagatgacgaggaaaagcagaattttcttcgggtattatcgcttcgtctcaaggaactggatgccatgtacgagaagtacatgaagggaaggattcgaacgcgcgaagattaagataaaagctcggagtaattatcaaaatgactcattctcaacatagcaaggaataattatgccagcatcggtaattagctttattaatatgaaaggcggggtaggaaaaacaactctatgtgttggcattgctgagttcatggctaactatcttggtaaaagagttttagttattgatgttgatcctcaattcaatgcaactcaatcactcctaggtcattatggtcgtgtcgatgaatatcttgatcaacttcaaacaaataaaatcacaatacgtcgaattttcgaagttccaacatccattatggatacggctcaagccattagacctgttgatgttataactaaagtttctgataacctcgacgtcatcttaggtgatattaatataatctttgacacatctcaggagtctgtaagaatattcaaaatcaagaggttcatcgatgataacaacctccgtgaccaatatgattatattttcctagatagccctcctacaatatcaattttcactgatgcttcacttgttgcttcagatttttatgtcgttccggtaaaaattgatcactactccattttaggagcaactagtctggtcagtgtggtgcgaaatgtaagacacaatcataatccgaatattagacacttaggattcgtttacaccaatactgatgatgaattgacattaaaaacaagcaagataaaagataattttgaagaaaaattcagtgaattttacttctttgaacataagttatcatacgtacgagatttaatggttgggcagcagggtaacattccctcttgctatacaaagtcaagaagtgatataagcgcaatatcaacagaattcgcattaagagttgaccaactaatggtgagtgaaaatggataaagaacaatacaacactctattcaggtttgcccatggcggagtaacaaaagaatccgcgataggtctttttgtgaccatcttacttgataaagatttgttaaaatcaaatcatgatgtaaaagattttgttgaaagtgtcttttccatagccctattaccatacgttgttcgctcaagaacacttatttgcgcaaaaatatgcagatttttagtaagcagagaaagaaaagaaatcaataactatggtgttatggctcgttcatatttcgaaaatattttttctaaagaagaagacctgcaaggccataaaaaaagaaatacagcactttctaatatggatctgtgggtatctaggatgcttaagaaaggcgataaataatgctttctaacgacccatacggcaacagagcagaaactgacaggtttcgccaagaggcaactaagtatctgagtgatgagtcagatataaataccttggtaagtgttttcaaacacgttagaatttatagcatgattattgaaatgaataccaatctatcacacaaatcacatgtgaagggtataatttatgattctttaaattccatcgttgcaatattaaataaaagagaacgatatttacatttaaatcttcgttctatgattgagcatatagcaagaatagctttgaataaaacttattctggtggtgatttcgatggaacggtacgacgacgagattttgattaccttaaatctaatagaagaaatgaaaattggaactatctgcacaatgtttatataaacgcttgtcattatgtgcatttttcaccgcaagcaaatattaacacgtcagcaacttttttgcagttgcttgtaaacgactgccattcatcgcaaaagaatcttattcgtaatctacatagattaacaagttccgtaatggaaacttacattacttattttcactatgaagttgcgagtacattttatagatccatggcagatctgaagtatctgctggggaatagtttatacaccaaatttaaagcgctgaactaacacctctaatttaaccgggcaacaaagacgttttttatccttagcccccttccccaaaactgcaagtgatcccagcctcatggctggttttttttgtccaaaatcggcataaatcacacctccaaaagtcagattaaacattttgtttattgatttatactcattatgttgacatatgtttaaacattgtgtttaatgaaatcaccaaaacgcaccacgaccacccaggcaggacgcccacgaagtagccgtccggggcatacgaagaccggaatgaggtggaaaagttaacgcgcagaaggtgataaacgttccgctggccggcgataaggcaaacgagggtgagaatgattgatttcgcacgtaaaccagctcgacagcaggccgtcccgctcaaccggattgaggttttaatccgccgcctctgctacctgctggcgcagaaaggagatccggatgcttaaacaatgcggttactgccgcaaatccattgatgaaggcaaagaagtaaaaaacacccttctctatctcaacggctcgcaactggcgcgcaaagaaaaggaatattgttccaggcagtgcgctgaatacgaccagatggcgcacgaaagttaaatagtagttccgaaatatgaaatgaaaaattcgccattaatttggcgtggcttcctacaccctgaatttaagactggagaaattatggaaatcgtaaaaatcgaaatgaacctgaaagcagttaataagagcattgctttattcaattgcgaaaagaaagtctcaggcgttattcactcaaattcaactggcgaaaccactgtgattctcgacggtggatatgtactcggaaagttcgactgtcctcattgtgctgtaaaagccatttcgctgctcacagtcaaggtaagtgatggagaacaagcagggtttggtaattaccgaagttacaagcttgattactcagaaaaattttatcagaccatccattaagaaaacgcccaccgaagcgggcgtgccctgtccggtccaaccgaccaaagcgaaccggacctaacaaccagatatatcggggtgctgttaaggcacctccattctacacgaattgaggacaaaacaatgagtggaactaatcctgtatttttagtccgcaaagcaaagaaatcatcaggccagaaagacgctgtactctggtgcagtgatgattttgaagcggcaaatgcaacactggattatcttctgattaaatccggtgcgaagctgaaagattatttcaaagctgtcgctactaatttccctgtcgttaacgagctgccgccggaaggcgaactgagcctcactttctgcgattactatcaactcgctaaagacaatatgacctggacgcaaatccccggcgtcaccctgccatcatctgaagccgccgccgcggcgcgccagcatatcgtcgatggtgttgataccgaaacaggcgaagtgctggaagaccacaccgaaaattttggtaacgaaagcaacagccctgcccaggcaacagccccagcccccgagctgactgttgtcgcaactatgcctctccgtcaccgcgttcttgctcagtacataggtgaaggtgagtatctttatcacgtcgacgcctcccagaaaaaagaaattctgcgtctcgaaatggacaccgataattcatatgtccagaacctgctgcttgccgccgagaatgttgaagcgttcaagaaagccattgaacatgacattcacaaaatagtgaatgccgttaaaaaaatattccctgtcgatggaaaaactcctgaactggcgactgttatccagttccttaaaacatggttcgagacggagcatatcgatcgcggtttgctcgttaaggagtgggcgaaaggcaaccgtgtatcggctattcaacgcactgaaagcggcgccaacgctggcggtggcaataagactgaccgtaaccctgattacgaacatactctcgatactctggacgtagagattgcaatggccactttgcctatggactttaatatctatgagctacctggcagcgtttaccgtcgcgcaaaagaaatcgtaaagaaaaaggaaagtccgttcaaagaatggtccgcagcacttcgcgcaacgcccggtatcctggattattcccgcgccgctattttcgcgctgatccgaagcgcgcaccctgagttttatcactaccccggacgccttcaggggtatatcaacgccaacttaacggagactgatcacgagaaccccaccgaggaagctctcacggctgcccgacacactccggaaaaagacgcggtagaagaagccaaccgacagcttgccgccgcgcgcggtgaatatgtggaaggcatcagcgacccgaacgacccaaaatgggtgaagaccgggacaagccagccgaccaccgaacctgaactggttaaaaatgttggcaacggtattttcgacgtgtccgctttaatgcagaactcatcaactcatggcacagaaacgaatccggagaccaccagcaatgtgcaggttcaaaaagctgacagtgatgaaaaacaggctggtgatgcggtgcaggcaggcgaaggcgatctgggtactggtaaagaagcagttaccgtagagaaccagtatctggctgagacgcaccagaacaacgattctgtgagccaatctgaacctgaggcgcaacaaaacgtaccggaatcgcaacaagaagagccagaagcagcctggccggaatacttcgagccgggccgctatgaaggtgtaccaaacgaggtttaccacgccgccaacgggatcagctcaactcaggtgaaagatgctcgcgtgtcgctgatgtactttaacgcgcgtcacgtagagaagactatcgtcaaagagcgctctccagtgcttgatatgggcaacctggtacatgttctggctctacagccggaaaacctcgaagcggagttcagcgtagagccggagatccctgagggtgctttcaccaccaccgccaccctgcgcgagttcatcgacgcgcacaacgccagcctgccagcgctgctgagtgctgacgatatcaaagcgctgctggaagagtacaacgccaccctgccgtcgcagatgccgcttggagcttcggtagatgaaacctatgcatcgtatgagcagcttcccgaagaattccagcgcattgaaaacggcaccaaacatacagccacggcgatgaaagcctgcatcaaagagtacaacgccaccctgcccgcgccggttaaaaccagcggcagccgtgacgcgctgctggagcaactggcaataatcaaccctgacctggtcgctcaggaagcgcaaaaatcgtcgccgttgaaagtctctggcacgaaggccgatctgattcaggccgtgaaatcagtcaacccggcagtggtattcgccgacgaattgctggatgcgtggcgggagaacaccgaagggaaagtgctggtcacccgccaacagctcagcaccgcgctgaacattcagaaagccctgctggagcacccgaccgccggcaaattgctgactcacccaagccgcgctgtcgaggttagctattttgggattgatgaggaaaccgggttggaagttcgggtacgccctgaccttgagctcgatatgggcggcctgcgcattggcgccgacctgaaaactatcagcatgtggaacatcaagcaggaaggcctgcgtgcgaagttgcaccgggaaatcatcgatcgggactatcacctgagcgcggccatgtactgcgaaactgcggcgctggaccagtttttctggattttcgtcaacaaagacgagaactaccactgggtcgccatcattgaggcgtctaccgagttgctggaacttggcatgctggaataccgcaaaacaatgcgagagatagcaaacggcttcgacactggtgaatggtcagcgcctatcacagaagactacaccgacgaactgaacgattttgatgtgcgccgccttgaagcgttgcgcgtacaggcataaggggaaaatcatggaaaacacaaatattgttaccactgagcagcaggcaccaaacaccatttctgccagtaacgcaatttttaacgttcaggcactgggtcagttaacagctttcgctaacctgatggcagactcacaggtgacggtaccggcacaccttgcagggaaaccagccgactgtatggctatcgtcatgcaggctatgcaatggggcatgaacccttacgctgtggctcagaaaacacacctggttaacggtgttcttggttacgaggcacaactggtcaacgcagtaatcgcaagctccagtgccattcatggccgttttcattaccgctatgggggtgactgggagcgctgcaccaggacacaggaaatcacacgcgataaaaacggtaaaaatgggaagtacaccgtcactgagcgcgttcgtggctggacggatgaggacgagatcggcctgttcgttcaggttggtgccattctgcgaggtgaatctgaaatcacctggggagaacctctttacctctccggcgttgttacccgcaattctccgctatgggtttcaaaccctaaacagcaaattgcctatctgggcgttaaatattgggctcgcctgtactgcccggaagtgatcctcggcgtgtacagccctgatgaggttgagcaacgagaagaacgcgagattaaccctgctccagtccagcgcatgagcgtacaggaaatcaccagcgaggttagcaccaggaccagcgcgcaggagtcggcagctaacgttgatgctgttgccgacgatcttcgcgaacgcattgatacagcaagttccgttgatcaggcaaaagcaatccgtgcggatatcgaatcacagaaagcgttgctgggtactgcgctgttcaccgaattaaaaaacaaagcagtgaagcgctattaccaggtcaatgcacagaacaaagtcgaggcagtgatcaactcaattccaaaccctggcgaaccggaagccgcagagatgtttgctaaagctgaaagcacgcttggcgctgctaaacgtcatcttggcgacgaactgcacgataagtaccgcgtccccctggacgatatgaaaccggaatacatcggctaattgcatcgggagggggtacgccctcccacctgaggaggttttatgcgcctaataaatcgcagtaagcaatcgccattgggccgtcgcgcatgtgatgttgcactggcggcgcatcatgaaaagttcggcgattacggcagacaaaagcacgttaccaattacaccgttgtagtggatggcgtaaaggtgcctgttgaagtagttaaccgggccaccagctacgtagccaccgcaatgatcggcgtccggaaacttagaaatctgccagcacaggcaaactgaatattagcgatggcccgctgcggggccactggagaaaacgatgagcaaaaaaattagagactttgaattgatgagcacccgcgaaatttgctgccagctcaggatttcttccaggacgctggagcgttaccgtaagcgaccaagcgacaacaacccattcccggagcctgactgttcatatatgggtggctccaacaaatggcttaaaaccaaagtcaatgagtggcaggtcagggaaatgtcacgaccaacacgccgtccaatgtcgcatctgaatctgccccgtgacaacaaaggtcgactcatccggtctgacgtggcgtgaactccagaacatcgggctcgatgatgctcatcagtcgggcccaccatttactataagcttctctcatttcttcgatataggtgtatttgtcgtacaccgaccacactccaggcagtttgtgcccgagcatcatctcagcaatatgtggttcagtcagctcggagaaattcgttcgcgcagttctgcgtagatcatggatcgtaaagtgcggaacctgctcgttataagccttcagcatgaacttaacaaggttgctgctgatgctcatatgaaagccttcgctcatcggcttgtctgcatattttgagaaaacaaaacggcctggcgccagctcaatggctcgttgtatcagcgggagcatttcagggatgatcgggcggattatcggcttcttacttttccgtcccgttttatgattttcccacggtacggtccagacgccctcctcaaaatcgaaatgcgaaacttcagcctgacggagttcaccgaccctgcacgcccatatcagggacaatttataaaggatcttgtttcgctcaataaggcgggaatcctcaatagctcgccagacaatcgcaatttctttgcgatccagtgttctctcccccattttcttctgaataccaaaatcacgaccggacatttcagaaagtgggttaacctcaagcaactggcgcttcactgcccatgagtagcactgccgaccgttactaattactcgccgggtgatctcagtgtatccctgcgccagtcggtccagaactgtaagccagttgtgcagcgtcaactgatgcgccggatacttacccagcttagggaatacatgcagctcaaacgaacgcagtatttgatcggatgtttctttctgaacgcataccatcgcatgccattctctgaaaagttcctcgaatgtgtactggctgttgattttagctttatcgaggctttgcctgatccgcggattttctccccgggcaagaatggcggcccacttagttacctcttcgcgcgcggccttcaacccgaattccgggtaactgccgatcgtcatcttgtcctgcttacccaggaaacggaatcggtagaaaaaagtgacggcgccctttttggaaatgcgcacccacagaccgtcccggtctgccttctcctcaactttatcgcgttcgcgcccgaggcacgactttagataactatctgaaatagccatgatttatccctgcatgtgtccatcagaacggaagattctgtgtccatcataggatatggacgcactggtggacacaaaaaccatgactcatgatgtcgtaggttgactgtacatgcaaccagtatcatttttgtgagcgcttattttgcggggatcttgagaggattttgtcgtaggtttgcggagggtggcggggtatcaattatcgatgtgagcaatgatcgaaaagttacgtatgttcttcatagagataaattattatgccttacgcctggttgaccagactttagaggtcgctgttctgagcttaacgtctgttttaactgaaacgccgcattctacactacaacgctaaggcgaggaaatgttcatagtgtaaggagagcgggaactggaaaacgcctcgcttttttcctgtaaaacaccgcaacgcaggaaaagcgcatgcttatcgggacaacaacccaacgcggcaggtgtaccgttgggcaaaacgtttactggcgcgtttcgattgaggtagtttcgacgcgaacaaggtcaggcgggagggcaacgtttaaaatcaccggctgccaggcgtcgcgctccgccagttttcgggaataaccgcgggcaaccagaaaaccgcccacgccgcccagcacggccccgcttaatgcggcaaggtcagatccaaacagcatctgaaaaagcgccgcacaaagaaatagccccgctaaaggcgacatatagaccagcaacgccgaacctaaaaggcttttttcggcgatgcccaactcgactttctgccccggcgccagcggctccgcgcttggcacaacaatggtatgcgtggtttgcggccctaatttattcagcacgcgactgccgcatcccgcacgggaggcgcagctgctgcatgacgctttaacgtcgcagctcaccaccgcctgaccattctgccaggagacaacggttgcccactctttaatcattgtactgccctgaatttgatactgtcggcaatgcgcttcgccgtttgcggcggaagctcgccgacaatggtgatttccgcgttgtcgcgaacgctgctataaaccgttcggcgcccggtgcgcagcatctgatcgctgctgttttgcgtcgcccggttcacattgacggaaaagctaaacagaccgtcagaataaagccgcgattcgataggcaggttatccatcgtcggcaacggacgacggctgctggaaacttcgctaaagccttgcggcacccaggatggactccagttaaatttcgttttttcgccaccgggaacagaaagcagcggcggcagattcgccttcgccagcgcctgcatgttgctgccgatatcctggctcaccgtgaacgcaataacgcggaactgctccagcgtctcgccatcgcgatccagcagatcaacgcgcatcggcagtttggtgtccatgtccatccagacgatatagctgtaacgcgtaccatcgcgcgccacaacgcggataacttcgcacaatctgtctgcgatacgggtgcgtccgacagaaataaagtcgtagtaaggcgccaggcgcttaaagtcggtgtaaatcagggaaggcagagaatcgacaatataatcaccgttcagggtgaacggctcaaggcccggttcaaaataactgatttcattaccacgctgtacgacctcccggcggggaccgtccaactgtagcaattgcgcaagcgggcgaccatccaggcgtgcgtgtcgataacgcagagattcaacgccttgtttcgtgatgctgacgaatgacagctcgtaattcagtgactgactggcgatgttcatctgctgcaataacgccccggacgcagggtcggccgaggcgtttgctgagaagaacaggctagccgccacaagggacatggcaaaccaaagttgcttcattactgcgattgcgttcctaaagtttggattcctggcacctgtaccgcggcttgctgggtttgcgcctgctcaaactgaagctgttcggagtgcagtcggcgctgcagttcatagtcctgcaacatggcattaatgcgacgacgctgctcctgtacctgctgttgctgactgccgacaggcgctgcttcagaaggcactcccagacttaccgggctggctttccccatcataggcagggtattgaaaaccggcgtttcaggttgttgggatgtttcagattgcccattatagtgctggacaccgacgataactgcaagtgaaacgcacgccgccacgcccatttgggtaagctgcgccgcccacggacgcacttttttccagaacggcattttctgccattgctgcggagcgggttgggcctcagggattaatggcgacacctgacgtactggctcgttttcaatagcggccatcacgcgagcggatatatcgaaatggagaacgtcaggcgtatccccccgcattgaatcgcggatcaggtgataactctcccaggttttctgcatttccgggtcgtgcgtaagcgctttgagcagctcactatccaacgtttcgccatccatcaaagcggaaagtttttctttctgcatgcctaataccttttccagtatcccgctatcgtcaacgcctgataagcggttgaactttattatcaatagcttcccgcgcccggaagatacgtgaacgcaccgtccccaccggacaatccatgatagccgctatctcttcatagctcaggccatccagctcccgtaaggtgattgccatacgtaaatcttccgggagggactcaatagttcggaaaactatctgtctcagttcttctgacaacattaagttctcagggttcgaaatttctttcagcgcgccgccgctttcaaagttttctgcttcaatcgcgtctacatcactggaaggcggacgacgcccctgcgcaaccaggtagttcttcgcggtattgaccgcaatacgatacaaccaggtataaaaagcactatccccccggaaagaatccagcgcgcgataggccttaataaatgattcctgtacgacatcgggaacgtcgcccgatggcacatagcgggaaaccagactcgccactttatgctggtagcgcactaccagtaagttaaaggctttctgatctcccttctggacccgttcaaccaggacctggtccgttaactgctcgctcatccgaggtaatgtctccccaaaccaaatttccacgcgctttcgaaacgccactccataagccgcactatgagcaagcaacaggttagagtgtctatgtttcgtaaagttccgttacgcatttgtttttgtttgtcatgttgtagacaggtcttatcttccattataagtctacagatgctgaacaacgcactatctgtacagaaatgcccatttcgtcgtttgcagagtaacctaacagcatctttatttcactacaaaatccgacgctaacaccctgccctataaaatattttttgccgtttatctctcgccgtatttttattttatgtttaataagcacaacaccagcgaaatcataacgtgctttttagcgccatatagtgctaatctgccgcaaccatgtttagtaaattaaacaagaaccatgatgacaactcctgaactgtcctgtgatgtgttaattatcggcagcggcgcggccggactctcgctggcgctgcgtctggctgaaaagcataaggttatcgtcctgagtaaagggccggtgagcgagggctccacgttttatgcgcagggcggtattgccgccgtgtttgatgaaaccgacagtattgcgtcgcatgtcgaagatacgctgattgccggcgccggaatttgcgatcgccacgcggtggagtttgtcgccagcaacgcccgtacctgcgtgcagtggcttatcgatcagggcgtcctgtttgatacgcatgtccagccaaacggcaaggagagctatcatctcacgcgtgaaggcggccatagtcatcgccgtatccttcatgccgccgacgctaccggaaaggaagtcgaaaccacgttggtcagtcgggcgcaaaatcatcctaatattcaggtgctggaacgcagcaacgccgttgatttaattatctccgataaaatgggtctgccggggcctcgccgggtcgtcggcgcctggatctggaatcgcaataaagagtgggttgaaacctgtcatgcgaagtcggtggtgctggcgaccggcggcgcctcaaaggtttatcaatataccactaacccggatatttcctccggtgacggtatcgcgatggcctggcgcgcaggctgtcgggtcgctaatctggaatttaaccagtttcatcccaccgccctttatcacccgcaggcgcgtaattttctccttaccgaagcgctgcgtggcgaaggcgcataccttaaacgtccggacggttcacggtttatgccggacgttgacgaacgcggggaactggcgccgcgcgatattgtcgcccgcgctattgaccatgagatgaaacaactcggcgcagactgtatgtttctcgatatcagccacaagcctgacgattttgtccgccagcacttcccgatgatctatgcgaaactgcttgatttggggatggatttaaccaaagaaccgattcccgttgttcctgccgcacactatacctgcggcggcgtggtcgtcgatgattatggtcgtaccgatgtagacggcttatatgccattggcgaagtcagttacaccggcctgcacggcgctaaccgtatggcgtccaactcgttgctggaatgcttagtgtacggctggtccgcagcaatggatatcgacaggcgaatgccttctgtccacagcgttgacgcccttcccgcctgggatgaaagccgcgtggaaaacgccgatgagcgggtggtgattcagcataactggcatgaactgcgcctgctgatgtgggactatgtgggcattgtgcgcacgacgaaacggctggagcgcgccctacggcgtattaccatgttgcaacaagagattgacgaatattacgccaactttcgcgtctcgaataatttactggagctgcgcaatctggtgcaagtggccgaactgattgtgcgttgtgcgatgatgcgtaaagagagtcgggggctgcactttacgctggattatccgcaacaactggctgaatcaggcccatcgatcctttcgccgttaacgcctcacataaatagataaaatgcctgggtcagcgccgtataactttcagaataatgctggtctgacccgcgaattactaatctgtcgctaaagcactccccggcttgcggggagaatgcgagcaaaacccggtgcggcaagcgcgcttcgttttccgcaacgtcagtacgtagccgcaaatgccatcccatgttgagcgcttgctgcgtaaaagcgttacctatttgttccggcaagactacgcaaaaaaagccatcttcggtaatacaatccgccgcaatagccaataacgtctggtgatccagcgtagcggtgtaacgcgcctgctcccgctgcggcgtggcgcattccacaccgggttcgtaataaggcgggttgctgataataagatcaaagcgtaccgtctggcgaggcgcccaacgctgaatatcgtcagtatgcaccgttattcgatgcggccagggagagtgagcaacgttttcctgcgcttgcatggcagccccggcatccagttccacggcgtcaataggcacattgtcatccgtccgctgcgccagcattaacgccagcagaccgcttccagtaccgatatccagaattcgctttacatccgcgaccggcgcccacgccccgagtaaaataccgtcagttcccactttcatcgcacaccgatcgtgtgcgacaaaaaactgtttaaacgtaaatccgttacgacgaagaacggagccagactgagacatgtaaaaacaaccttgcaaaaaaacggcgacagcgccgggtgaaaacaatacctgagaagggatatccatacaaacagatgaagattgcggccgtaacgtctataatcagcgccccacacagaggtagaacatgactgtaacgactttttccgaacttgaactcgacgaaagcctgctggatgccctccaggataaaggtttcactcgcccgaccgccattcaggctgccgccattccgcctgcgctcgatggccgtgatgtactcggttctgcgccgacaggcaccggtaaaacggcggcatatctgctgccggcgttgcagcacctgctcgactttccgcgtaaaaaatcggggccgccgcgcattctgatcctgacgccaacccgcgaactggcaatgcaggttgccgatcacgctcgtgaactggctaagcatactcatctggatatcgccacgattaccggcggcgtggcctatatgaaccatgctgaagtgtttagcgaaaaccaggatatcgtggtcgccacgacgggccgtctgctgcaatatataaaagaagagaactttgactgccgggcggttgaaacactgatccttgacgaagctgaccggatgctcgacatgggcttcgctcaggacattgaacatatcgctggtgagacccgctggcgtaaacaaacgatgctgttctccgccacgctggaaggcgatgcgattaaagattttgccgagcgcctgctggaagacccggttgaggtttctgccaatccgtcaacccgcgagcgtaagaaaattcaccagtggtactaccgtgccgacaatttcgaacataaagttgcgctgttgaagcacctgctaaaacaagacgatgcaacccgttctatcgtgtttgtacgtaaacgtgaacgcgtccatgaattggctgaaacactgcgtctggcagggatcaacaattgctatcttgaaggtgagatggcgcagatcaaacgtaacgaaggtattaagcgtctcaccgacggtcgcgttaacgtgctggtcgcgaccgacgtcgcggcacgcgggattgatattcctgacgtcagccacgtcattaacttcgacatgccgcgcagtggcgatacctatctgcatcgcattggtcgtacaggccgtgctggccgcaaaggcactgcaatctcgctggtagaagcccacgaccatctgttgctgctgaaaatcggtcgctacatcgaagagccgctaaaagcgcgcgtcattgatgagcttcgcccgaccacgcgtgcgcctagcgaaaagttgaccggcaaaccgtcgaaaaaagtgctggcgaaacgcgccgagaagaaaaaagagaaagaaaaagagaagccgcgcgtgaagaaacgtcaccgcgatacaaaaaatatcggtaagcgccgcaagccaagcggtacgaaaatgcaggagcaatccagcgaagagtgatgataatgccgggttcgttaacccggcatttttttatcttccacggtaaaacacgcctccatacactgcataaatatctgcattgccgggctgaccgctttcccggcatgatgggcgcacagcgccatgatcgatagcgacggcgcgccaaacggcagctctttcaactgaccggtactaagttctcgttcaacggcaaaacgtggtaaaaagctgatgcccaggttagcagccacacactgtttaatgctttcaatactccacagttcaatggtgttttccagcgtaatccgcctctgccgtagcgtactttcaaacagctggcggaagacacattgcggttcattgatgatgaagctacagggaatatgctgatctggctgcgtaaaatcagcatcctgtagcagtggagaggccaccagcgccagcgactgcttccccaattgctgcatcgtgagcgcgtcatcattacctacgcgataaaaaacgcccagatcgacctcgtcattcagcaacgcatcacgtatcacatagcaattcagcgactgtagcgacaatctgacattcggcgctcgcagcttaaaacgttgtaaaacctgcggcattttgtacgccagtaaggtttcacctgtcgccacgcgcagctctccgccgggttccgcatcctgtcttgcggcttcacgaatcgactccatcacacgcgtcagttcatggatatgcggcatcagctttttcccctcattggtcaggcacattcggcgccctattttctcgaacagttgcagggaaaactcacgttcaagctgttgaatatgaaaagttaccgtcgactgagtgcagcacagcttttgcgaagcccgcagaaacgagccctcttccactaccgttttcagcgtaataaaccgacgcagatccataaccaccaacctatcgaaaatctcgaattcagaattaaaaaacattcatttttttaaatatttcatatcgggtactgtctgctaaaacagaggagatgacaagtgacaccgatgcttttaagcgctttctggacttatacattaatcaccgcccttacccccggccctaacaatattctcgcgcttagcgcagcaactgcacatggttttcggcagagtattcgtgtactggcaggtatgagtctgggatttttggtcgtcatgctgctgtgcgccgggatcgcgttttcccttgcggttatcgatccggcaatcattcatttgctcagttgggtgggggctgcgtatatcctgtggctggcgtggaaaattgctaccagtccagcggcggatgagaacgccagaccaaaaccggttggcttttgggtaagctttggtctgcagtttgtgaacgtcaaaattattctgtacggcattaccgctctgtctacatttgttttaccgcaaacgcaggcgctgaattgggtcatcggcgtcagtatattgctggcattgatcggcacgttcggtaatgtgtgttgggcgctggcgggacatctgtttcagcgggcgtttcgccattatggtcgccagttaaatatcattctggcgttactgctggtgtactgcgcggtgcggattttttactgacccaaataaaacaaaagcggaaaaggcccggcctcttccgcttgttattaccggataagccttacaggctttcggtaaaggtacgagcgataacgtcgcgctgctgttccggcgtcagggagttaaaacgcaccgcataaccagaaacacgaatagtcagttgcgggtatttttccggatgcttaaccgcatcttccagagtttcacgacgcagaacgttaacgttcagatgctgaccgccttcaacgcgtacttccggtttaacttccatcggaatttcacggtattcaatctcgcccagtttgctgacagccacaacttcatcttcagcaaagccggattttgcaacgatgcagcgcgcttcgcctttttcgctgtccagcagccagaaggaattcagcaggtcgtcgttagcggctttagtaatctggatacctgtaatcatgtgatgcctccccaggcaaaattatttgatttcggtcggcctaatcccggccaattggtaaaaccattgttgcttgagtgtatatatacccttcgatcacccttcattctttgatttaaatcaataaaaaccacaccacaaaaagggtgatgaagggaatttattgttttacatcaacttacaccattcagacctataaactttttacataaattttcaactatcttttgtaggtaaccgtttttgtagcacgcaggattttgcactgcagaaagaagcagttaagctaagggaactggaaattcgcaggagagcgagatggcgactgagttaacctggcacgatgtgctggctgatgagaaacagcaaccttactttatcaatacgcttcacactgttgctggcgagcgtcagtcgggtatcacggtctacccgccgcaaaaagatgtgtttaacgcctttcgctttacggaactgggcgacgttaaggtggtgatcctgggacaagatccttaccacggccccggccaggcacatggtctggcgttttccgtgcgtcctgggatcgctcccccgccatcattagtgaatatgtacaaagagctggaagcctccattcccggctttgttcgccccgcgcacggttatctggaaagctgggcgcgccagggcgtactgttactgaatacggtgctcacggtacgggcaggccaggcgcactctcatgccagcctggggtgggaaacctttacggataaagtgataagcctgattaaccaacaccgcgaaggggttgtcttcctgctgtggggctcgcacgcccagaagaaaggcgcgattattgatccacagcgccaccatattctgaaagctccgcatccctcgccactctctgcgcaccgcggattttttggctgtaaccattttgcgctaacgaaccaatggctggaacaacacggcgagaaaactatcgactggacgccagtattaccggctgagagtgaataacgttggcgactcgccgttttatcgcccggataacggcgcgaaagcgccttgtctgaccgggcggtagaaagtacatcattggcccggcgcgcgttgcgtcaccgggctgcagcccttacgctttattctgtcgccaccactcggcgagcagtacgcctgtcgcaaccgacacattcaggctttccacgttcccggtgccgttaattttcacgcacagatcgtcgggttcgcgcgccgcttccggcaggtagtcatattcacggcctaagaccagcaccatcttttccggcagggtcgtactaaagagcgcctgaccgcgatcgctggacgtcgtcaccacggtgtaccccgcctgacgaaaatcatccagtacgtcaacaatgctttcaccagtgatcggctggacatgctccgccccgccttccgcggtacgaatcgccgcgccggactccagcaacgccgcatcctgtaccaccacgcctttcacgccgaagtgcgcgcagctacgcatcatgccgcccagattatgcgggttagcgacatcttccaacgccagcacgcagtcttgatccgccgcctgctttacccattgcttaacggtcgtaccgttacgctttttaatcaggaaacacacgccaccgtggtgctcagtcccggaagcttttgccagttcggcttcatccaccacatggtaggctttacgattcgccgccatccagcgcagcgcctctttaaaacgcggcgttacgctttggataaaccatgcgcgcacgatggcgtcaggacggctctggaatagcgcctggcaggcgttttcaccgtagacgcgcgtctcttccgcacgctggcgacgcaaaacttcagggtcaataaaacttttaccgctaataccaccatgatcgactttctcaggcgtttcatcgcctggcgcgcgggacacggtgcgccacggcgaagtttcatgtttacggtcacggctctgattatttcgctcatcacgggcggggcgacgtccaccgtcagtgcgagactttgctgggcggcctccccctttcccggtacgcgggttatgggtgcgtttatcagagtcatcatcactacggacatacatcactttgactttgccgcttttgttttttaattcatcgttcatgcttttctccaccagcgctgcgcgaagcgcgaagattacccgatgtgcatccggttagccatgatttcgtttaaaagcttgcgactattgtactcattgaataaaacacattgttgtttagcacagactcctcgataatatgtaacattatagaaacatcccgcgcgtagcgggacgtcttccgacgtattcagaggttagctatgaacaccgtttgtacccattgtcaggccattaaccgcatccccgacgatcggcttcaggatgcggcaaaatgtggacgctgcggtcatgagttgtttgacggagaagtcattaatgcgaccggcgaaacgctggacaaactgttgaaggacgatcttccagtggtaatcgacttttgggccccctggtgcggcccttgccgtaactttgcgccaatcttcgaggatgtcgcagaagagcgcagcggtaaagtccgtttcgtcaaagtgaataccgaggcggaacgggaactcagcgcccgtttcggtatccgcagcatcccgacgattatgatttttaaacatggacaggtggtcgatatgcttaatggcgcagtgcctaaagcgcctttcgacagctggctgaacgaagcgctgtaaacgccacggggcgcatcttgtgccccgttttcacctctgccacaatagcgtttttctccgcaaacgctttctatgaccaataacgctgtccttcagttacgcgccgaacggcttgcgcgcgctactcgcccttttcttgccagaggcaatcgggttcgccgctgtcaacgctgcctgctgccgctaaaatcttgcctgtgtgatacgttaacgccttctcaggcgaaaagccgtttttgtctggtcatgtttgacactgaaccgatgaaacccagcaataccggccggctgatagccgatattttgccggataccgcggcgtttcagtggtcgcgtaccgagccgccgcaggcgttgctggagctggtacagcatccggattatcaaccgatagtggtctttcctgcgtcctacgccggcgaagcgcgcgaggtcatttccaccccgcccgccgggaaaccgccgctgtttattatgctggacggcacctggcccgaagcacgtaaaatgtttcgtaaatgcccttatctggatcatctgccggtcatttccgtcgatttatcgcgtctttcagcttatcgtctgcgtgaaatccatgccgaagggcaatattgtaccgccgaagtcgccatagcgttgttagatctggcgggagataccgaggcggcaaccagtttaggtgaacatttcacccgtttcaaaacgcgctatctggcaggaaaaacgcaacatccgggaaacgtcacagcataaaatagcgaaagcgtttaaaattatccggtcacttctgtgtaagggaaaccggtatgagccagcaaggactggaagcgctactgcgaccaaaatcgatcgcggtgattggcgcatcaatgaagccccaccgcgcgggttacctgatgatgcgtaacttgttggcgggcggattcaatggccccgtccttcccgtgacgcccgcctggaaagccgttttaggcgtcatggcctggccggatatcgccagtcttcctttcacccccgatctggctattttatgcactaacgccagccgtaacctggcgttactggacgcgcttggcgcgaaagggtgtaaaacgtgcattatcctttctgctcccacgtcgcaacatgaagaacttcttgcctgtgcccggcattataaaatgcgtctgctgggtccaaacagtcttgggctcctcgcgccgtggcaagggctgaatgccagcttttctcccgtcccgattaaacagggcaagctcgcttttatttcccagtctgccgccgtgtccaatactattcttgactgggcgcaacagcgtgaaatgggcttttcctactttatcgcgctgggcgatagcctggatattgatgtcgatgaactactggactatctggcgcgcgacagcaagaccagcgcgattttgctctatctggaacagttaagcgacgcccgccgttttgtttccgccgcccgtagcgcttcacgtaacaaaccgattctggtgattaaaagcggccgaagcccggcagcccagcgtttacttaataccagcgcgggaatggaccctgcgtgggatgcggccatccagcgcgcaggcctgctgcgagtccaggatacgcacgagcttttttccgccgtcgaaacactgagccatatgcgtccgctacgcggcgacagactgatgatcatcagcaatggcgccgcgcctgccgcgctggcgttagatgagttgtggtcgcgtaacggcaagctggcgacgttgagcgaagagacctgcctgcaactacggcaggcgcttcccgcgcacatagatattgccaatccgctggatctgtgtgatgacgccagcagcgaacattacgtcaaaacgctggatatcctgctcgccagtcaggattttgacgcgcttatggttatccactctcccagcgctgccgcgccgggtacagaaagcgcccatgctctgatcgagacgattaagcgccaccccagaggcaagtttgttacgctgctgacaaactggtgcggcgagttctcgtctcaggaggcaagacggctattcagcgaagccggattaccaacctaccgtacgccggaaggcacgattaccgcgtttatgcatatggtggaataccggcgtaaccagaagcaactgcgggaaacgccagcgttgccgagtaacctgacgtccaataccgctgaggcgcataatctgttacagcgggcgattgcggaaggcgccgcctcactggatacccatgaagtacagccgattttacacgcctatgggctgcacacgctcccaacctggattgccagcgacagcgctgaagcggtgcatattgccgaacagataggctatccggtagctctcaagctgcgctcgcccgacattccgcataaatctgaagttcagggggtcatgctttacctgcggaccgcaagcgaggtacaacaggccgcgaacgctatttttgatcgtgtaaagatggcctggccgcaagcgcggattcacggtttgctggtacaaagcatggctaaccgcgccggcgcgcaggagcttcgtgtggtggtcgagcacgatccggtgtttggtcctttgattatgttgggtgaaggcggcgtagagtggcgtccggaagagcaggctgtcgtcgcgctgccgccgctcaacatgaacctggcgcgctatctggtgattcagggcattaaacagcggaaaattcgcgcccgtagcgcgctgcgtccgctggatattgtcggtttaagccaattgctggtccaggtttcaaacctgattgtcgactgcccggaaattcagcgtctggatatccatccgctgctggcttccgccagtgagtttaccgcgctggatgtgacgctggatattgccccgtttgatggcgataacgaaagtcgacttgcggtacgcccctatccccaccagcttgaagagtgggtggagatgaaaaatggcgatcgctgcctgttccgtcctatcctgccggaagatgagccccaactgcgacaattcatcgcacaggtcaccaaagaggatctttactaccgttatttcagcgagatcaacgaattcacccatgaagatttagccaacatgacgcagatcgactacgatcgagaaatggcctttgtggccgtgaggcggatggacaatgctgaagagatcctcggcgtaacgcgcgcgatctccgatcctgacaacgtagatgccgaatttgccgtattggtgcgttcagatctcaaagggttgggtttaggacgccgtttaatggagaaattgattgcctatactcgcgatcacggattgaagcggctgaacggtattacgatgccaaacaatcgcggcatggtcgcgctggccagaaaactgggatttcaggtcgatattcagctcgaagagggcatcgtgggattgacgctgaatctggccaaatgtgatgaatcgtgagtaatgtactggaaatgttgaccactttaacgggtactgatgttattattgctcgcttatgtcgtctgcatagcacagaggacccttcaatgaacagagaagaaatgcactgtgatgttgtcaaaatttaagcgtaataaacatcaacaacaccttgcccaactccctaagatttctcagtcagttgatgatgtagatttcttttatactcctgctacttttcgggagacactgctggagaaaatcgccagcgcgacgcagcgtatttgtatcgttgccctgtatctggaacaggacgatgggggtaaaggtatactcgacgcgctctatgcggctaaacggcagcgtcctgaactggacgtgagggtgctggtcgactggcatcgcgcgcaacgcgggcgcattggcgcagcggcctcgaataccaatgcagactggtattgccgactggcgcaggaaaaccccggcattgatgtcccggtttacggcgtaccgattaatacgcgagaagcgcttggcgtactgcattttaaaggctttatcattgatgatagcgtcctgtacagcggcgccagcctgaacgatgtctatctccatcagcatgacaaatatcgctacgatcgctaccagctgattcgcaatcggcaaatggcagacatcatgtttgactgggtgacgcaaaatctgatgaatggccgtggtgtgaatcgtctggataatacccagcggccgaaaagcccggagattaaaaacgatatccgcttataccgtcaggagctgcgtgatgcgtcatatcattttcagggtgacgctaatgacgagcagctctccgttacgccgctggtcgggcttggaaagtccagtctgttgaacaaaaccattttccatctcatgccctgtgcggagcataagctcaccatttgtaccccttacttcaatctaccagcggtactggtgcggaatattattcagctactgcgcgacggaaagaaagtcgaaatcattgttggcgataaaaccgcgaatgatttttacattccggaagatgaaccgttcaagatcattggcgcgctgccctatctctatgagattaacctgcgccgcttcctgagccgtttacagtattacgtcaataccgatcagcttgtggtgcgtctgtggaaagatgacgacaatacctatcatctgaaagggatgtgggtagatgataaatggatgctactcaccggcaacaacctgaatccccgcgcctggcgtctggatctggaaaacgccattttgatccacgatcctaagcaggagcttgcccctcagcgggaaaaagagctggaacttatccgaacgcacacaaccatcgtaaaacattatcgtgacctgcagagcattgccgactatccgataaaagtgcgtaaattgattcgccgtctgcgccggatccgcatcgacagattaattagccgtatcctgtaatcgaagccccgtcctgtacggggttttctcttaggagtgaactggtgcgcgtgttgattccttttacggtgttgtttctctccgggtgcagccatctggctaacgaccactggagcggtcaggataaagcccagcattttatggcatcagcgatgctatcggcagccggtaatgagtatgcgcgtcaccagggagtaagccctgaccgcagcgcagcgatagggctgatgttttctttgagtctcggagcctcaaaagaactctgggacagccgcccggaaggcagcggctggagctggaaagattttgtctgggatgtcgctggcgcgacaaccggttacgctatctggcaaatggcgcgatactaaaggcgtaagccctttcctttacggtgcaacatcaacgaaaccaggaaagccagaacggccatcgcggtaacataccagaagaacgaactctccataccgacagattttagcgacagcgcgacatattccgcagagccgccaaataacgcgtttgctaccgcgtaagataaaccgacgcccagggcgcgaacctgcgccggaaacatctccgctttcaggatcccgctaatcgaggtatagaaactcacaatcaatagcgcgcatatcactaaagcaaatgcggcataaggcgacgtcacattctgcaacgcggagagaattggaacggtgaaaagcgtcgcgagtgcgccaaaacatagcatagaggtgcgcctgccaatcttatcggataacgcgccgaataacggctgcaccaacatgaaaacacacagcgcagccgtcataatgccgctggcgacattggcatgcatacctgctgtatttaccagatatttctgcatataggtggtgaaggtataaaagcacagcgagcctgccgcggtgaaaccaagcaccatcaaaaaggctttgcgattacgccacaaacctttcaacgaaccggcttcttttaatgcgcgagtctcatgcttcgaggtttcatccagctggcgacgtagccataacgccacaaccgccagcacggcgcccagcgcaaagggaatacgccatccccaggcacgaagctcagcatcgtccagaacctgctgcaaaatcacaacgaccagcaatgccagtagttggccaccgataagcgtaacgtactgaaacgacgcgaaaaatcccttacgaccttcaagcgcaacttcactcatatatgtcgcgctggtcccatactctccccctaccgagagcccctgaaataaccttgcaataagtagcagcgccggtgcccaggtgccgatggtatcgtaaccaggtaagcaggcaatcaccagcgaccccatgcacatcatgcacaccgaaatcaacattgaggctttgcgcccgcgtcgatctgcaatgcgtccaaatagccaaccaccgataggccgcattaaaaaaccggcggcaaagacgcctgccgtttgcaaaagctgagtagtggtattaccagaaggaaagaagatatgtgcaaaatagagcgagcagaaagagtagacgtagaaatcaaaccattccactaagtttccggaagaggcccccacgatagcccatatgcgtcgccgcatctccggagcctcagcgttgtttttatctatacgctgaataatttctgccatactgttctccttgttgccaggcttaatcggccttttattttggagattcagattacgcgagacccaaaagtaaataaagtgttaattatttgtttgctaatttttatccccaccgtgcctgatgctggcgtttccgtttcagatagtcttcgtcctgacggattttatcccaccaacctttgaaaaccgttgccgccgcggccttaataggatcattaccccgtgtattcaggctgccgtcttctgcatactttttaccgcctttatagttagcgtatcgcctggcgcgggtgtatcccatctgaataaatttacgcgccatgtccataccaacgaaatcatcctgctgccggtaagcttcgaacaactggtagatctgttctgcggatttcatcgccgatgcttcatctttatagcgccagaaaggaagaatttcgcttttgtagggttcaaccagtagcaccccctgctcgcctcgtccaacctgatacaattcaggctgctggcggaagtcgatgctggaaaagtcctgctggtagttaaaaggtttgatagccaatgaaaatcctcactgcttatataagcacgtgtaaaggatagttcatcgttaatgattgggtgggttgtgctcttatcagttctacaagagcaccaacttcgtaggcgggataattcctgtaggccggataaggcggagccgccatccggcagaaacagacaaaaacaaaaggccctgtcttccgacagggcccttcgttttatttgatgcctggcagttccctactctcgcatggggagaccccacactaccatcggcgctacggcgtttcacttctgagttcggcatggggtcaggtgggaccaccgcgctacggccgccaggcaaattctgttgccagaaacgaatcttttacaccgatgctgcgttggctgcattcgcaaagtcagtcacatacttctgtatgctccttcctttccttcatttgccgccttgcctcagcgtaaaatctttcgttcccgaaaatccggaatcagtgctgaaaatcttctcttaaccgccaaaacatcttcggcgttgtaaggttaagcctcacggttcattagtaccggttagctcaacgcatcgctgcgcttacacacccggcctatcaacgtcgtcgtcttcaacgttccttcaggagactctaagtctcagggagaactcatctcggggcaagtttcgtgcttagatgctttcagcacttatctcttccgcatttagctaccgggcagtgccattggcatgacaacccgaacaccagtgatgcgtccactccggtcctctcgtactaggagcagcccccctcagttctccagcgcccacggcagatagggaccgaactgtctcacgacgttctaaacccagctcgcgtaccactttaaatggcgaacagccatacccttgggacctacttcagccccaggatgtgatgagccgacatcgaggtgccaaacaccgccgtcgatatgaactcttgggcggtatcagcctgttatccccggagtaccttttatccgttgagcgatggcccttccattcagaaccaccggatcactatgacctgctttcgcacctgctcgcgccgtcacgctcgcagtcaagctggcttatgccattgcactaacctcctgatgtccgaccaggattagccaaccttcgtgctcctccgttactctttaggaggagaccgccccagtcaaactacccaccagacactgtccgcaacccggattacgggtccacgttagaacatcaaacattaaagggtggtatttcaaggtcggctccatgcagactggcgtccacacttcaaagcctcccacctatcctacacatcaaggctcaatgttcagtgtcaagctatagtaaaggttcacggggtctttccgtcttgccgcgggtacactgcatcttcacagcgagttcaatttcactgagtctcgggtggagacagcctggccatcattacgccattcgtgcaggtcggaacttacccgacaaggaatttcgctaccttaggaccgttatagttacggccgccgtttaccggggcttcgatcaggagcttcgcttgcgctgaccccatcaattaaccttccggcaccgggcaggcgtcacaccgtatacgtccactttcgtgtttgcacagtgctgtgtttttaataaacagttgcagccagctggtatcttcgactgacttcagctccgtgagtaaatcacttcacctacgtgtcagcgtgccttctcccgaagttacggcaccattttgcctagttccttcacccgagttctctcaagcgccttggtattctctacctgaccacctgtgtcggtttggggtacgatttgatgttacctgatgcttagaggcttttcctggaagcagggcatttgttgcttcagcaccgtagtgcctcgtcatcacgcctcagtgttaaagtgaaccggatttacctggaacacacacctacacgcttaaaccgggacaaccgtcgcccggccaacatagccttctccgtccccccttcgcagtaacaccaagtacgggaatattaacccgtttcccatcgactacgcctttcggcctcgccttaggggtcgactcaccctgccccgattaacgttggacaggaacccttggtcttccggcgagcgggcttttcacccgctttatcgttacttatgtcagcattcgcacttctgatacctccagcatgcctcacgacacaccttcacaggcttacagaacgctcccctacccaacgaacgtatccctaagccaactcgactttaatgaacgctttgacgtcgcttcgctccgtcaatcgtcaactccgtaaagttgtcttgggtgatacgttcgctgccgcagcttcggtgcatggtttagccccgttacatcttccgcgcaggccgactcgaccagtgagctattacgctttctttaaatgatggctgcttctaagccaacatcctggctgtctgggccttcccacatcgtttcccacttaaccatgactttgggaccttagctggcggtctgggttgtttccctcttcacgacggacgttagcacccgccgtgtgtctcccgtgataacattctccggtattcgcagtttgcatcgggttggtaagccgggatggccccctagccgaaacagtgctctacccccggagatgaattcacgaggcgctacctaaatagctttcggggagaaccagctatctcccggtttgattggcctttcacccccagccacaggtcatccgctaatttttcaacattagtcggttcggtcctccagttagtgttacccaaccttcaacctgcccatggctagatcaccgggtttcgggtctataccctgcaacttaacgcccaattaagactcggtttccctccggctcccctattcggttaaccttgctacagaatataagtcgctgacccattatacaaaaggtacgcagtcaccccaccccaaagcattcaccgcttgttttgtgtgttgggcgtcgcaaacgacgctccgccaccgcgatgctgctttgcagggccttcaacaccagagaatgctttggtggtggggctcccactgcttgtacgtacacggtttcaggttctttttcactcccctcgccggggttcttttcgcctttccctcacggtactggttcactatcggtcagtcaggagtatttagccttggaggatggtccccccatattcagacaggataccacgtgtcccgccctactcatcgagctcacagcacatgcgcttttgtgtacggggctgtcaccctgtatcgcgcgcctttccagacgcttccactaacacacatgctgattcaggctctgggctcctccccgttcgctcgccgctactgggggaatctcggttgatttcttttcctcggggtacttagatgtttcagttcccccggttcgcctcattaacctatggattcagttaatgatagtgtgacgaatcacactgggtttccccattcgggtatcgccggttataacggttcatatcaccttaccggcgcttatcgcagattagcacgcccttcatcgcctctgactgccagggcatccaccgtgtacgcttagtcgcttaacctcacaacccgaagatgtttctttcgattcatcgtcgtgttgcgaaaatttgagagactcacgaacaactttcgttgttctgtgtttcaattttcagcttgatccagatttttaaagagcaaatatctcaaacgtgactcgtaagtcagttttgagatattaaggcaggtgactttcactcacaaaccagcaagtggcgtcccctaggggattcgaacccctgttaccgccgtgaaagggcggtgtcctgggcctctagacgaaggggacgtatcagtctgcttcgcaagacgccttgctatttacttttcatcagacaatctgtgtgagcactgcaaagaacagttctttaaggtaaggaggtgatccaaccgcaggttcccctacggttaccttgttacgacttcaccccagtcatgaatcacaaagtggtaagcgccctcccgaaggttaagctacctacttcttttgcaacccactcccatggtgtgacgggcggtgtgtacaaggcccgggaacgtattcaccgtggcattctgatccacgattactagcgattccgacttcatggagtcgagttgcagactccaatccggactacgacgcactttatgaggtccgcttgctctcgcgaggtcgcttctctttgtatgcgccattgtagcacgtgtgtagccctggtcgtaagggccatgatgacttgacgtcatccccaccttcctccagtttatcactggcagtctcctttgagttcccgacctaatcgctggcaacaaaggataagggttgcgctcgttgcgggacttaacccaacatttcacaacacgagctgacgacagccatgcagcacctgtctcacagttcccgaaggcacaaatccatctctggattcttctgtggatgtcaagaccaggtaaggttcttcgcgttgcatcgaattaaaccacatgctccaccgcttgtgcgggcccccgtcaattcatttgagttttaaccttgcggccgtactccccaggcggtctacttaacgcgttagctccggaagccacgcctcaagggcacaacctccaagtagacatcgtttacggcgtggactaccagggtatctaatcctgtttgctccccacgctttcgcacctgagcgtcagtctttgtccagggggccgccttcgccaccggtattcctccagatctctacgcatttcaccgctacacctggaattctacccccctctacaagactcaagcctgccagtttcgaatgcagttcccaggttgagcccggggatttcacatccgacttgacagaccgcctgcgtgcgctttacgcccagtaattccgattaacgcttgcaccctccgtattaccgcggctgctggcacggagttagccggtgcttcttctgcgggtaacgtcaattgctgcggttattaaccgcaacaccttcctccccgctgaaagtactttacaacccgaaggccttcttcatacacgcggcatggctgcatcaggcttgcgcccattgtgcaatattccccactgctgcctcccgtaggagtctggaccgtgtctcagttccagtgtggctggtcatcctctcagaccagctagggatcgtcgccttggtgagccgttacctcaccaacaagctaatcccatctgggcacatctgatggcaagaggcccgaaggtccccctctttggtcttgcgacgttatgcggtattagccaccgtttccagtagttatccccctccatcaggcagtttcccagacattactcacccgtccgccactcgtcagcaaagcagcaagctgcttcctgttaccgttcgacttgcatgtgttaggcctgccgccagcgttcaatctgagccatgatcaaactcttcaatttaaaagtttgatgctcaaagaattaaacttcgtaatgaattacgtgttcactcttgagatttggtattcatttttcgtccgaggacgttaagaatccgtatcttcgagtgcccacacagattgtctgataaattgttaaagagcaggtgcgacgcggcttgcagctcaccgtcgcgaggtggcgtatattacgctttcctctttttgagtcaagcctttattttcgctttcctcacagacttcttaacgaagcttttctgacccggcggcctgtatgccgttgttccgtgtcagtggtggcgcattatagggagttattagagcctgacaagacctaaatgcaaaaaaaagctcaaccgttcacttttcaaacaacatttgaaccaaaagcctattttcgcctggtttttaaacaaaaacgagcccgtcagggcccgttttattcaaatttgtgacttactgcactgccacaatacgatcatcattggcttcaaggcgaatcactttgccaggaaccagttcaccagacaggatttgctgcgccagtgggttttcgatctgctgttgaatagcacgttttaacggacgcgccccgtagaccggatcgtaaccgttggcgctcaacagtttcagcgcctcgtcggagatatggatttcataaccacgttcttccagacgtttgtacagacgctgcagctggatctgagcaatagaagcgatgtgttgttcacctaacggatggaataccacaacttcatcaatacggttgataaattccggacggaagttttggctaaccacacccagcaccatctctttcattcgaccgtaatccagttcgccaaagcgctcctgaatgagatcggaaccgaggttagaagtcataatgaccaccgtattacggaagtcgaccgttctcccctgcccgtcagtcagtcgaccgtcgtccagcacctgcaacagaatgttgaatacatccggatgcgctttttccacttcatccaacaagatgacggaataagggcgacggcgcaccgcttccgtcaaataaccgccttcttcatagccgacatatcccggaggcgccccgaccaaacgagacacggagtgtttctccataaactcagacatgtcgatacgcaccatcgcgtcgtcgctgtcgaacataaagttagccagtgctttacacagttcggttttaccgacccccgtcggccccaggaacaggaaggaaccaatcggacggttcggatcggacagcccagcacggctacgacgtatggcgttcgatactgcttcaacggcttcattctgcccgatcacacggctgtgtaactcttgttccatacgcaacagtttttcacgttcgccttccagcattctggaaaccggaataccggtccagcgcgctagcacttcggcaatttccgcatccgttactttgttacgtaacagacgcatggttttaccttccgactgggtcgcggcttccagctgtttttccagctccggaattttgccgtactgcagttcagacattcgcgccaggtcgccaacgcgacgcgcctgctcgatggcaatcttcgcctgctccagctccgctttaatagtttgcgtaccagagagcgacgctttttccgctttccactcttcttccagctcagaatactggcgctctttgtcgtccagttcttcgttgagcatatcgagacgttttttactcgcctcgtcagactctttcatcaacgcctgctgttccagtttgagctgaataatgcggcggtcgagtctgtccagctcctccggcttagagtcaatctgcatacgaatgctggatgcagcttcatcgatgaggtcgatagctttatccggcaactgacggtcggcgatatagcggtgagataatgttgccgccgccacaatcgccgggtcagtgatctgcacatggtggtgcagctcgtaacgttctttcaggccacgcagaatagcgatggtgtcttccactgaaggttctgcgacaaacactttttgaaaacgacgttccagcgccgcgtctttttcaatgtactgacggtattcatccagcgtggtggcgcccacacagtgcagttcaccacgcgccagcgccggtttcagcatattcccggcgtccattgcgccatcagccttacctgcgccaaccatcgtgtgcagctcgtcaataaacaggatgacgttgccttcctgtttcgccagatcgttcagcacgcctttcagacgctcttcaaattcgccgcgatatttcgcccccgccaccagcgcgcccatatccagcgccagtacgcggcgaccttttaagccttcagggacttcaccgttaataatgcgctgcgccagtccttcaacaattgccgttttaccgacccctggctcaccgattaacaccgggttgtttttggtacgacgttgcagtacctgaatggtacggcgaatttcttcatcacgaccaattaccgggtcaagcttgccttgttcagcccgctcggtcagatcgacggtatattttttcaaggcctgacgttggtcttcagccccttgatcgttcacgctttcacctccgcgcatctgttcaattgcctgagtgatattggccgtggtcgcaccggctgatttcagcagatcggttaacgtgccgcgagactcaagcgccgccagaacaaacagctctgacgaaataaaattgtctccccgtttttgcgccagcttgtcgcaaaggttcagtacgcgtaccagttccgaagaaggctgtacgtcgccgccggtgccttccacctgcggtaaacggctcagcgcctgatcgatagcggtgcgcaactggccagcattaatgccggcggaggttaataaaggacgtatcgatcccccttcctggttcagcaaggcgctcattaaatgaagaggttcgatgaattggttgtcgtgccccagcgcgagcgactgggcatcggcaagagcaagctggaatttgttagtaagacgatccagacgcataactcctcccataacaggtcaaaattgctactggagattaaatgaggtcatccctcaattattcaaggtgaatgacctgaattatgtgaaaagaaagttacccgtaccggatcgtcttgattctttaggttatatcagccaaataaaacttgccatacgacctgtcgtcttgtcgcgacgataagagaagaaagtctcactttcgctaaaggtgcagcgatccccgccatagacatgttcaacgccggtattcgccagacgttggcgtgcaagctgataaatatccgccagaaatttttccccgtgcggcaaaaatgcgctatcggcttgcgcatcttttgctaaaaatgcgtcacgcacttccggccccacttcaaacgcggtcgggccgatcgccggacctaaccaggcgatgatattttctggtttgtcagcaaagcaggtgacagtttcctccagtacgccttcacataatccgcgccagcccgcatgagccgccgccacttctgttccctcacggttacagaatagcacaggcaggcagtctgccgtcattaccgcgcagacggttcctggcgtattgctgtaagacgcatccgcacgtttggaggcataaggttctccggtaagcctcaacacatttttaccgtgaacctgttcaagccagacaggtttcgaaggcagattgcccgccgcaaacagacgcttgcggttctcttcaacatgctccgggttatcgccgcaatgcgcgcccagattcagcgagtcgtaaggcggtaaactcaccccgccaatacgggtagaactacaggctgcgacgcctttcggcagcggccactgcgggacaatcagtgcattcataaccagtccacatcatctttatgatcttcaaaatcggcgcgcatcgcatcgataaggtccaccatatcttgtggaatcggcgcgtgccactccatttcgatacccgatacaggatggtagagacgcagcatcgttgcatgaagcgcctggcggtcaaacttacgcagagtggaaataaactcttccgatgcgcctttcggtggacgtggacgaccaccgtagacctgatcgcccactaacgggtgcgtaatatgcgccatatgcacgcggatctggtgcgtacgcccggtctccagacgcagcctaagacgcgtgtgcacacggaaatgttccataatgcggtagtgggtcaccgccggtttgcccatgggatgcactgacatatgggtacgtttggtcgggtgacgactgatgggttcattcaccgttcctcccgccgtcatatgtccgatcgcgaccgcttcatattcgcgggtgatctcgcgcagctgcaaagactccaccaggcgcgtttgcgccggaacggttttggccaccaccatcagccccgtcgtgtccttatccagacgatgtacaatgcccgcgcgcgggacatccgcaatcggcggataataatgtagcaacgcgttcagtaccgtaccgtccgggttacccgcgccaggatgtaccaccagatcgcgtggtttgttgataaccagaatatcgtcatcttcataaacaatatctaacgggatatcctgcgcttcaaaacgaatctcttcgtcgatctccgcatcaatagccacccgctcgccacctaacactttttcttttggcttatcgcaaagttgaccattgaccaacacgcgctgattcaaaatccattcttttatacgcgaacgtgaataatccgggaacatttcggccaaagcctgatctaagcgttgaccgagttggttttcggagaccgttgcggtgagttgtactcgttgtgccatatacagcttcttcgtttaacgttgggttttacggctttgccgtttaatatagtgtgctattgtagctggtcttaaccgggagcaggaacagagaatctcccgtaaaacattttgaggaaagtcaaaacgtcatgacgcgcatgaaatatctggtggcagcagccacgttgagcctgtttctggcgggttgctcgggttcaaaggaagaggtgcccgataatccgccgaatgaaatctacgcgactgctcagcaaaagctgcaggacggtaactggaaacaggcaataacgcaattggaagcgttagataatcgttatccattcggaccgtattctcagcaggtgcagttggatcttatctacgcctattacaaaaacgccgatttgccgctagcgcaggccgccatcgatcgttttatgcgtcttaatccaacgcaccctaatattgactatgtcatgtacatgcgcggcctgacgaacatggcgctggatgatagcgcgctgcaaggtttctttggcgtcgatcgcagcgatcgcgatccgcaacatgcgcgggcggcgttcaatgacttttcgaaactggtacgcagctatcctaatagccagtacaccaccgatgccactaagcgtctggtattcctgaaagaccgtctggcgaaatatgaatattccgtcgcagagtactataccgcgcgcggcgcatgggttgcggtcgtaaaccgggtagaaggtatgctacgcaattatcctgatacgcaggccacgcgcgatgcgttgccgctgatggaaaacgcctatcgtcagatgcagctgaatgcgcaggctgacaaagtcgcgaaaattattgccgctaacagcaaaaacacctgaagcaatacaaacaagcaaaacggcagccttccggctgccgtttttttattcggtatctgatgcaacagaaatgatttcactgcaacgcatccagtcaaatatggcctgctttcagccattcctcaagtaaaagatcgcttcttcctgcgatgcctcacaaaaagttcgccttgacaaaaagtgacaaaataatgtgatttacatcacacattttgacattaagaacggtatgctggaatcaccaagacgggaaagacaagaggtaaaatttatgacaatgaacattaccagtaaacaaatggaaattactccggcaatccgccaacatgtcgcagaccgtctcgccaaactggaaaaatggcaaactcacctgattaatcctcatatcattctgtctaaagagccacagggctttattgctgacgccaccattaatacaccgaacggacatctggtcgccagcgcaaaacacgaagatatgtacaccgctattaatgaattgatcaacaagctggaacggcagctcaataaagtgcagcacaaaggcgaagcccgtcgtgccaccgcatcggtgaaagatgccagcttcgtcgaagcagaagaagagtagtcccttacattgagtgtatcgccaacgcgccttcgggcgcgttttttgttgacaggattaaaacagtacgggtactgtacttacgtacacaaaggaaacagttatgaagctcacccggtttttcttcgcattcttttttatcttcccctgaccgggaggcgtttcgtcatgtgataaagaatgcgaagacgaacaagaaggcctcccccaccgggaggccttttttattgataacaaaaaaggcaacactatgacatcggaaaacccattactggcgctgcgagataaaatcagcgctttagacgaagagttactggccttactggcaaaacgacgcgcgctggcgattgaagtgggacaagcaaaactactgtcgcatcgtccggttcgggatatcgatcgtgaacgcgcgctgctggacaggctcatccatctcggtaaagcccaccatctcgacgcacactacattacccgtctgttccagcttatcattgaagactccgtgcttactcagcaggcgctgctgcaacaacatctgaataatactcaccctcattcggcacgtattgcgtttcttgggccgaaaggctcctattctcatctcgcggcgcgccagtatgctgcacgccattttgagcaatttattgagagcggttgcgcaaaattcaccgatatttttcatcaggtcgaaaccggccaggccgattacgccgtggttccgatagagaacaccagctccggcgctatcaatgatgtgtacgacttattgcaacacaccagtctgtcgattgtcggtgagatgactgtcactatcgatcactgcgtgctggtttccggcgctacagatctgaataccatcgaaacggtgtacagccatccgcagccgtttcagcagtgcagtaaatttttgagccgctatccgcactggaaaatcgactataccgagagtacgtcggcagcgatggaaaaagtcgcgcaggcaaactctccgcgcgtcgcggcgctcggcagcgaggcaggcggcatgttgcacggattacaggtgctggaacgcatcgccgcaaaccagacgcagaatatcacccgctttctggtactggcgcgcaaagccattaatgtttccgatcaggttccggcaaaaaccactctgttaatcgccaccgggcagcaagctggcgcgctggtcgaagcgctgctggtgctgcgtaaccacaatctcatcatgacgaaactggagtcgcgccccattcacggcaatccgtgggaagagatgttttatctcgatattcaggcgaacctggagtcgcaggtaatgcaaagcgcgctaaaagagctgggcgagatcacgcgctcaatgaaagtgcttggctgctatcccagcgaaaacgtcgtgccggtagaacctgcctgacgttcaataaaacggcttttcttcatccctgcgacggctacctgcagggtgaagatggcgccggagagcggataatccgccacttcctgagcagacatattttctctggtagttgtaataaacagcgttttcatatctgcgccgccaaagcaaaccatcgtcggacaacgtaccggcaaccggtactcttccagctgctcttcttgcggtgagaaacgcgccacgcgccagccgtcaaacatcgcgctccagtagcacccttcgctatccatcgccgcgccgtcgggaagtccttctccttcgccaaaatggcgaaaaagttcacgcttgcccggatcgccatgcttatcaagtaacgtgcggtatatcacgccattcggcgtatcggaggtatacatccactggttatccgggctgaacgccaggccgttgtgtccctggatatcgcactggatcacttttgccgtcaggtcatgatcgatccgcatcagcaacgcgccattatagtcacctggcgcccagaacgttccggcataaaaacgtccatcgccatcagtgccgccatcgttaaaacgcgccagtttcgtattagagggattgtcgcaaaccttacgctgcaataatccatttttatcggccagccagatagcatgacgcatggccacaataaatccgccctgctcacgcaaggcaaaacagcccacctcttccggaaacaccagcacgctatgcgtcccactcgccggatggtaacgatggatctcctgttccaggatatcggtccaatacagcgcgctttcatcctcgctccatgtggggcattctggtagatgtccgacataatcaaataaaacgtgcggcgtagtcataacggttccttaaacgaaaaaagccagcaaagctggcttttagtatagatgtcatcattatggtcggctgtcattcgcctgacgcaataacacacggctttcattctggaagcgtctggcataatcgccaaaccagtgttcaactttgcgaaaactgtcgataaaagcctgcttatcaccctgttccagtaacccgatcgcatcgccaaaacgtttatagtaacgcttgataagcgccagattgcgctccgacgacataataatgtccgcatacagttgcgggtcctgggcgaacagacgcccgaccatcgccagctccagtcgataaatcggcgatgatagcgccagaagctgctcaagctggacgttctcttccgccagatgcagcccataagcgaaggtagcaaagtggcgcaacgcctggataaaagccatgttctgatcgtgctcgacagcgctaattcgatgcaaccgcgcgccccacacctggatttgctcaaggaaccactgatacgcttccggttgacgcccgtcacaccagaccaccacctgcttcgccaggctcccgctgtccggaccaaacatcggatgcaagcccaacacggggccatcatgggccgccaacattgcctgcaacggaccgcttttcaccgatgccagatcgaccagaatacagtcggacggcaggggcggcagttgcgctatgacctgttcagtaacatgaatcggcacgctgacgatcaccattccggcatcggcgacaatgtccctggcgcgcggccagtcctgctgttccagaatacggacctgatagcccgacagcgtgagcattttttcaaacagacgccccatctgtccgccgccgcccacaatgacgaccggacgcagagaaggacaaagcgttttgaaccccttatcattttcgctggagtaagattcacgcattacccggcgcaggacatcttcaatgagatcgggcgggacaccgatcgcttctgcttccgcccgtcgtgaagccagcatagaggcctcacgctccggcacgtaaataggcaggccaaaacggcttttcacctcgccgactttggcaaccagttccaggcgcttagccagtaaattcaacaacgctttatcgacatcatctatttgatcgcgtaatgcggtcaattcagcaaccataacaacctcttatgcgacgcgcaccgccagctggccgctcaaatctttatgaatttcacgtaacagggcatcggtcatctcccagctaatacaagcatcggtgacggaaacgccatacttcatttcgctgcgcggctgttcggaagactggttaccctcatgaatattactttcaatcattaagccaatgattgaacgattgccatctttaatctgcgcaaccacagattcggcaacggctggctggcggcgataatctttattggagttaccatgactgcaatctaccatcagcgaaggacgtagtcccgcctgttccatctctttttcacactgagcgacatctgccgggctatagtttggcgctttgccgccacgcagaatcacatggccatgcggatttccctgggtttgcaataacgcaacctgaccggcctggttaatgccaacaaaacgatgaggttgcgcagcggcgcgcatggcgttaatcgctgtcgccaggctgccatccgtgccgtttttaaagccgaccggcatagaaagaccagacgccatttcgcggtgggtttgcgattcggttgtgcgcgcccctatcgccgaccagctaaacagatcgcccaggtattgcgggctgttcggatccaacgcttcggtcgccaatggcaaccccatattcaccagttccaccagtagctgacgcgctattttcaacccggcttccacatcaaatgagccatccatgtgaggatcgttaatcagccctttccagccgacggtagttcgcggcttttcaaaatagacgcgcattaccagatagaggctatcgctgacctctgcggcaagggctttaaatcgacgggcatattccagagcggtttcaggatcgtgaatagaacaaggaccgcataccaccaacagacgcggatcgcgcccggcaataatgtcagaaatgattccccgggactgcgctatctgcgcttcctgcgccaggctcaagggaaaggccgctttaagctgctccggcgtcattaatacctgttcatcggtgatacgtacgttattcagcgcgtctttttgcatgatggcgatcctgtcttttcttgtttgcgatagttgatcctccacgaggatgtttaaaccataccacaaaaagtaaagatttcaatccatattacgtaaaataaactttacaccatgcgcaatcgtcgattaatctccctcatttcgtatcaaaaactttacacaacaagtgaattattttattcccagcctcagaaaagcggtaaaatgagcgatgctcgctattttttgattattttttctccgcacacatatttttactttctgatatagggtgattaataccattatcacaagaatttaatatcagggatatcacttaaattattcatattatcaataagacataatgacgatatggcaaaataatgttattttgctacaaacaatcacggatgtattttaatgctttacgactgaagatggtggggacttgttaatgcgtttttctcaccgatttatccttctgttatcgctattattagcaagcttgcctctgtatgctcaacgcgtcacggaagaagagaaatccgtacgcgccatcgtctccggtatcgtcagttatacacactggccggcgttatccgggccgccaaggctatgcatattttcatctgcgcgttttgtcagggtacttagcgaagaggctgactgggctttcccttatcaaccgcttgtcatccgtaccacacaagaagccctgagcgcccgctgtgatggtttttactttggcaatgaatcgccagcttatcaggtggagttaacgcgtcattatccagttaatgccttgttattaattgccgagcaaaataccgaatgtattattggcagcgcattttgtctgatcattaacaatgatgaagtcaaattttccgtcaacctggactccctctcgcatagcggcgtgagagtaaatccagaagtattaatgcttgcacggaatcaaaagcatgaataaggaattttctctgtccaggccaacatttaaacgcacactacggcggattagtataatcagcgtgctgcttacaatgacattgatctggctattaatttgcgttgcgtctgtccttacgctcaaacagtatgcgcaaaagaatctcgatttgaccgccgccacaatggcccatagccttgaagcggcactggtattttccgataacgcggccgcagcggaaacgctcgccacactgggacgccagggacaattttcagcggcggaggtccgcgataaaaatggccgtactatcgcctcatggcgctatgatgcgcgagccgcagacgataagctcattggcttaattagccactggctttttccattgccggtatcacaacccgtctggcacaacggcagggccatcggcgaagtacggcttgtcgcccgcgacagccttattggtcattttatctggctatcgctggcagtgctgacaggatgtattctgctggcatccggcattgccctgctgctcacgcgttatttacacaatggcgttgtggatgcgctgcaaaatattactgaagttgtacacgacgttcgcactaaccgaaatttttcacgccgggtacctgatgagcgtattgcggaatttcacctgtttgcgcaggatttcaatagccttctggatgagatggaagaatggcagctacggcttcaggctaaaaatgcccagttactacgtaccgcgttgcacgatccgctgacggggcttgccaatcgcgcggcatttcgcagctgtattaacgcgctgatgaaggacaattccgctcgtagcagttcggcattgttatttctggatggcgataactttaaatatattaatgatacctggggacatgcggcaggcgaccgcgtacttatagaggttgccaaaagattagcggaattcggtggtagccgttatcagacttaccgactcggcggcgatgaatttgcgatggtgctttacgatgtacattcggaatatgaagtacaacgtatttgcgcagcgctatcccaggcgtttaatcgaccttttgaactgcataacggccagcgaataacgatgaccctgagtattggctttgcgctgacatgggaacatgccactgccgaaaaactacaagaactggccgatcgaaatatgtatcaggctaaacaccggcgtgcggagcgctcgctaaactaaggaacgggcctggccgtttctgactcagcgttgagaccactgacccagcctaatcatgcaaccatctatggcgtggagcaaacccataaaaaaggggccagcgtaatgccagccccttcttttctacaagctttcggatgttgcgaaagcgcgttcttagttaagacgctctttgatacgagccgctttaccagtacgctcacgcaggtagtacagtttagctttacgaacagcaccacgacgtttaacagcaatgctgtcaactaccggagagtgagtctggaagacacgctcaacgccttcgccgttggaaattttacgaacagtgaatgcagagtgcagaccgcggttacgaatagcgataaccacgccctcgaatgcctgcagacgtttcttggtaccttcaacaacccatactttcacttccacggtatcgcccggacggaaggaaggtacgttctgcttcatctgctcttgttcaagttgcttaataatgttgctcataatttaatctcttatcctgggtaaactgatattcgggggcctatgccatcccatcatgtttatgctgctgttgtgcgtgttctgttttgaactccgccagcaaccttgcttgctcttcagtcagagccaggttttccagaagttcaggtcttctaagccaggttcggcccagcgactgtttcaaacgccagcgacgtatctcagcatggtttcccgacagcaatactggcggtacttccatcccctctaacacttcagggcgcgtatagtgcggacaatccagcaacccatcagcaaacgaatcttcgattgctgatgcctcatgccccagaacccccggtataaaccgggcgacggagtcaatcagcgtcattgccggtagttcgccaccgctgagaacgtaatcgccaattgaccattcttcgtcaatttcggtctgaattacgcgctcatctacgccttcgtagcgaccacacaccagaataagcttctgattcgtggccagctcgctaacgcccgcttgatcaagcttgcgtccctgaggcgacagataaatcactttagcgccttcacctgccgcggcttttgctgcgtgaatggcgtcccgcaagggttgcaccatcattaacatccccggtccgccgccgtaaggacggtcgtccacggtacggtgccggtcatgcgcgaagtcgcgaggactccagctttggatgttcagcaggcctttttttactgcccggccagttaccccgtaatcggtaattgcgcggaacatttcaggaaacaggctaactatgccaataaacacaagccaatccccataacgccatttattaccgtttattcggtggtttaaaaaccaggatcccagtctacttcgatagtacgagtagcgagatcgactttcttgataacctgcccatcgaggaacggtactagtcgttccttgataccaaatgcatctttcaggttcgccttaatgacgagaacgtcattcgacccggtttccatcatgtcgataactttaccgagatcgtagccttcagcggtgactacctggcagcccatcaggtctttccagtagtagtctccctcctcaagcgcaggaagttgcgaggaatccacgacaatttcgcaattggtcagaagattcgcggcatctcgatcgtcaacgcctttcagcttgatgatcagatcctgattgtggtgcttccagctttccagctgtacctgctgccactgacccgccttctggataaaccagggctgatagtcaaaaatgctttcggcgtcttcagtggaggaaaacactctgagccaaccacggataccgtatgaagaacccattttccccagtacaaccggttcagcgggtacttgtgcggcgagttgcttgctcatcatgaccaccgtgacagattaagctgctttttttacttctttgatcagcgccgcaacgcgatcggaaatggttgcgccctggccaacccagtgagcgatgcgatccagatccaggcgggtgccttcttctttttcgctagcgattgggttgaagaaaccaacgcgctcaatgaagcgaccgttgcgtgcattacggctgtcggtgacaacaacctggtagaacggacgctttttagcgccgtgacgagctaaacgaatagttaccataacatcctcttgtgtgaataaaacaaccgggccccatcgaggaacggagcccggcgtcatattaaaagcccgaaaattttactgatttctgggaaaaaagcaatcaacatgtgatgaagcttgattccagggcgtgaccgttgcagccagtttggcgtcggcgtgcgcgcagaaagcggagcgtacacgcagtacgtgagcatttactcgctccgctcgcccttcgggccgccctaaagggcgttcaaaacactatcgtgttttgtcgagcacactccggcgtcaaaatggcaaataaggtagcccgatatatttatctacccgggaagcctggcggcatcatccccttcatactccgcatcatcttcgccatcccgcccttcttcatcttcttcatcatgcgctgcatgtcgtcgaactgtttcagaaggcggttaacgtcctgcacctgcatcccacagccctgcgcgatacgacgcttgcgggaacctttgatgatttccggcttcgcgcgttctttcagcgtcatcgaattgatgatcgcctccatacgcaccagcaccttgtcatccatctgcgatttaacgttgtccggaatctgccccatgcccggtaatttgcccatcagactggccataccgcccatgtttttcatctgtttgagctgttccaggaagtcgttcaggtcgaaaccgtcgcctttcttcagtttggtcgccagcttctcagcctgtgcgcggtcaactttgctttcgatatcttcgataagagacagtacgtcgcccatgccgagaatacgcgaggcgatacgatccggatggaatggctccagcgcgtcggttttctcgccgacaccgaggaatttaatcggcttgccggtgatatgacgaatagagagcgccgcaccgccacgcgcatcaccatcaactttggtcagcaccacgccggttaacggcagcgcttcgttaaaggcttttgcggtattcgccgcatcctgaccggtcatcgcatcgacgacaaacagcgtttctactggcttgatagaagcgtggacctgtttgatttcgtccatcatcgcttcgtcaacatgcagacgaccggcggtatccaccagcagcacgtcgtagaatttgagcttcgcttctttcagcgcggcgttgacgatatcaaccggtttctggccgacatcagacgggaagaaatccacgccaacctgctcagccagcgtttcgagctgtttgatcgccgccgggcgatagacgtcggcagagacgaccagcactttcttcttgtgcttctcgcgcaagaatttacccaacttaccgacgctggtggttttacccgccccctgcagacccgccatcaatactacggctggcggctgcgcagctaaattcagcgtctggttctcttcgcccatcgccgcaaccagttcgctacggacaatcttgacgaactcctgccctggggtcaggctcttgttaacttcatgaccaaccgctttctcttttacgcgattgatgaactcacgcactaccggcagcgcaacgtcagcctccagcagcgccatgcgcacttcgcgcagcgtctctttaacgttgtcttcagtaaggcgcccacggccactgatattgcgcagcgtgcgcgacaaacgatcggttaaattatcaaacattgtctctcgcctggggtggaaacggttggtcgccgcagcgacacagttacagaatttcgccacagtataccatgaagccgtctttgttgttatgcaacggttggagctgcggtcacgtaacgctatactgcttctctttctcactggtcaactgtcgacacaactatgcccgtttttgctttacttgcccttgtcgcctactccttcagcctcgcgctgatcgttcccggactgttgcaaaaaaacagcggctggcggcgtatggctattctttctgcggtcatcgcgctggtgtgccatgctgtcgcgctggaatcgcgtattctgcccggcggcgacagtggacaaaacctgagcctgctgaatgtcggttcgctggtcagcctgatgatctgcacggtgatgaccattgtcgcgtcgcgtaatcgcggctggctacttctgcctattgtctatgcttttgcgctgattaacctggccttcgccacgttcatgcctaatgaatatattacgcatctggaagcgaccccaggcatgatggtgcacatcggtctgtcgcttttctcttacgcgacgctgataatcgccgctctgtatgcgctacagctggcgtggatcgactatcagttgaagaacaaaaagctggcgtttagtaatgaaatgccgccattgatgagcattgagcgcaaaatgtttcatatcacgcagattggcgtcgtactgctgacccttactctgtgtaccggcctgttttacatgcataacctgttcagtactgaaaatattgataaagccgtgctctctatcgtggcatggtttgtctatatcgttctgctgtgggggcattaccatgaaggctggcggggtcggcgggtcgtgtggtttaacgtcgcaggcgcgggtattctgacgctggcctattttggtagccgcatattacagcaatttgtaagctaagcttttaaaggagtttcccctggaacacatctccaccaccacgctgattatcatattaatcatcatggtggtcatctcggcctatttttccggttccgaaactggaatgatgacgctaaaccgttaccgtttacgccatatggcgaagcaaggtaatcgctcggcaaaacgggtagaaaaattattgcgtaaacccgatcgactgataagcctggtgctgatcggcaataacctggtcaacattcttgcctcggcgctcggcacgattgtgggtatgcggctttacggcgacgccggcgtggctatcgccaccggggtactgacgtttgtcgtgttagtttttgctgaagtcctgcccaaaactatcgccgcgctctatccggaaaaagtggcctatcccagcagcttcctgctggcgccgttacagatactgatgatgccgctggtgtggttacttaacaccatcacccgcctgctgatgcgtctgatgggaattaaaacggacatcgtggtcagcgggtcgttaagcaaagaggaattacgcactatcgtgcatgaatcccgttcgcaaatctctcgccgcaatcaggatatgctgctgtcggttctcgatctggaaaaggtcagcgtggatgacatcatggtgccgcgtaatgaaattatcgggatcgatatcaatgacgactggaagtctatcgagcggcagctcacccactcgccgcacggacgcattgtgctctatcgcgattcgctggatgacgccatcagtatgctgcgcgtgcgtgaagcctggcggttaatggccgagaaaaaagagttcaccaaagagatgatgctgcgcgccgccgatgaaatctattacgtcccggaaggtacgccgctcagtacgcaactgattaaatttcagcgcaataaaaagaaagtcggactggtcgtcaacgaatatggcgatatccaggggctggtcaccgtggaagatattctcgaggagatcgttggcgacttcaccacatcgatgtcgccgacactggcggaagaggtcacgccgcaaaacgacggttcggtcattattgacggtaccgccaacgtccgggaaatcaataaagcgtttaactggcacctgccggaagatgacgcgcgcaccgtcaacggggtgattctggaggcgctggaggaaattccggttgctggcacgcgcgtgcgcattgagcagtacgatatagatattctcgatgtacaggaaaatatgattaagcaggtaaaggttgtaccggtaaaaccgctgcgcgagagtgtggcggagtaacacaatggcgaactccggttcgccttttttatcgccgtcttttaagattccatcaattcctgccatttacttaacaatgcaataatgtcttttcaggcattcagaaaggatattgatgttatgtcagaagattatgtaattgaatgggataagaattttgcagacgacctcaacgtcgtcgccaacgtttttttatcacacaacccaaccttatggcccactattttctctcaactttcgacgcaacctgaaatctttgaagacgaagatgaagacgaatatgggttgcaggacgtcctggattgtagcggtggcgatctcggaaataacgagctggcacaggcatttttacaagttctacgcggcgaaggatttattcacctcgttgactggaaaggtgaagatgaagaaggcgaactggctaattttgccgcagatcgcttttatgaactcacaaaaaacctgacggattctgaggaattaagaaatcttcttgtcgaaataacccaagaggatgaaatctccgatgtctgtgaagccggggaccgttaccttgacgagatctttgaacgcatccagaccgaactcaataagaggggcttccagatttttgatctgaatgaaggatctgacacctataatgtggtcgttctgccaatgagcgaatataaaaaaatagaggacttcaacacgccgtggctggaagtgcaggattttttaagctaaaaaaatggccgactttacatcggccatcaaacttttacttcgccttcgctacagtcaccatcgccgcgcgaatggtacgaccgttcagcgtatagcctttctgcataatacccagcacattgcctgccggaacctcttccgactccaccatcgcaatcgcctgatgcacgttcgggtccagcggcacgttggtctcagcaatcacttccacgccgaatttacgcaccacatccagcatagacttcagcgtcagctcaatcccttcgaccattgccgccatatccggattggctttgtctgcgacttccagcgcgcgatccaggctatcgatgaccggcagcaattcgttgacgaacttctcgagagcgaatttatgcgctttttcgatatcctgttcagtacgacggcgcaggttttccatttccgctttgatgcgcaacacggtgtcgcgttcgcgagtctgggcttctgcaagctgaacttccagattcgcaattttttcatcgcgcggatccacctgctcagcagaatcgtttggttcaactgcctcaacctcttcgtgctgatccatgataatttcttccggggcttgcccctcaggcgttttctgttctttactactcatgaatttctccgcgtttttttcgcattcatctcgctaacttcgcttattatggggatcagattcagggtttcaagggaagtactcacattgtcatcaatcttcgctacaaggacctcagaaaaatgaataatcatttcaagtgtatcggcattgtggggcatccgcgtcatcccaccgcactcacgacacatgaaatgctctaccgttggctatgcgatcagggttatgaggtcattgtggagcaacaaatcgcccacgaattacagctaaaaaatgtgccaaccggcacgctggcggaaattggtcaacaggcggatctggcggtagttgtgggcggcgacggcaatatgcttggcgcagcgcgtacgctggcgcgttatgacatcaatgtgattggcattaaccgcggtaatcttggcttcctgaccgatctcgatccggacaacgccctgcaacaattatctgatgtgctggaagggcgctatatctccgaaaaacgttttctgctggaagcgcaggtctgccaacaggaccgccagaagcgtatcagcacagccattaatgaagtggtgctgcatccgggaaaagtggcgcatatgatcgaattcgaggtttatattgatgaaaccttcgctttttcacagcgatctgatggtctgatcatttctacgccgaccggctccaccgcctattcgctctccgcaggcggccctattctgaccccttcactggatgccatcaccctggtgccgatgttcccgcataccttgtcggcacgcccgttagtcattaacagcagtagcacgattcgtctgcgtttttcgcatcgccgtagcgatctggaaattagctgcgacagtcagatagcgctgcctattcaggaaggagaagatgtgctgattcgccgctgcgactaccatctcaacctgatacatcccaaagactatagctatttcaatacattaagcacaaaactcggctggtcaaaaaaattattctaattttacgttagcctctttactgtataaaaaaccagtttatactgtatttaattacagtcatggtttttcatacaggaaaacagctatgttggcgcaactgaccatcagcaattttgctatcgttcgtgagcttgagatcgattttcagagcggaatgaccgtcattactggtgaaaccggcgcgggtaaatctattgcgattgatgccctgggtctgtgtctgggcggtcgcgctgaggccgatatggtccgtaccggagcgacccgcgccgatttgtgtgcccgctttgcgctgaaagacacgcctgcggcattgcgctggctggaagaaaaccagcttgaagaaggtcgcgaatgcttacttcgccgcgttatcagcagcgatggccgctcacggggctttattaacggcaccgctgtgcccctgtctcaattgcgcgagctcggtcagttgctgattcaaattcacggccaacatgcgcaccagcagcttaccaaacccgaacagcaaaaatcgctgctggatagctatgccaacgaagccgctttagcgcagcagatggctgctcgctaccaattatggcatcaaagctgccgcgatctcgcccatcaccagcaacaaagccaggaacgcgccgcgcgcgcggaactgctgcaatatcagttaaaagagttgaacgactttaatccgcaggccggcgaattcgagcaaattgacgaagagtacaaacggctggccaacagcgggcagttgcttacgaccagccagaacgctctggcgctactcgcggacggcgaagacgttaacctgcaaagccagttatatagcgcaaaacaactggttagcgagctggtaggtatggacagcaagctttccggcatcctggatatgctggaagaagccactatccaactcaccgaagccagcgatgaattacgccactattgcgagcgtctggatttagaccccaatcgcctgtttgagcttgaacagcgcatcgctaaacaaatttcgctggcgcgaaaacatcacgtcagcccggaagcgctgccgcagctttatcagtcactgctcgaagaacagcagcagctcgacgatcaggccgattcgctggaaacgctaacgctggcggttaataagcatcaccaacaagcgctggaaacggcgcaagcgctgcatcaacagcgtcagttttacgcccaggagctggggcagttgatcactgaaagtatgcatttactttcgatgccgcacggtctgtttactatcgacgtgaaatttgatgagcatcatctgagcaacgacggcgccgatcgcgtggagtttaaagtgacgacaaacccaggtcagccgctgcagcctatcgctaaagtcgcgtctggcggtgaactgtcgcgcattgcgctggctattcaggtgattaccgcgcgcaaaatggaaacgccagcgctgatttttgacgaggtcgatgttggcatcagcggcccaaccgccgccgtggtcggtaaactcctgcgtcagcttggcgaatccactcaggtgatgtgcgtcactcacctgccacaggtagccgggtgcggtcaccagcacttctttgtcagtaaagaaacagacggggcaatgaccgaaacccatatgcaacctttggataaacgtgcgcgtttacaggaactggcccgcctgttgggaggaagtgaagttacgcgtaatacgctggcaaacgcaaaagaactgctggcggcgtaaacttttttatctcccgaaggtctgagttcacaacaaaaacgccgtaagacccgacagcaaaaggttttaaagtgatgaaaggtctattatcatcggcatattaatatgagccacgtactgctcaggcccgaaaaggaacccaatcactatgcgctgtaaaacgctgactgctgccgcagcagtactcctgatgttgaccgcaggctgttccactctggagcgagtggtttaccgacctgacatcaatcaggggaactatcttacacctacggatgtcgccaaagtgcgtgttggtatgacgcaacaacaggttgcgtatgctttaggcacgccgatgatgaccgatccttttggtacgaacacctggttttatgtcttccgccagcagccaggacatgagaacgtgacgcagcagactctgacgctcacctttaacagcagcggcgtgttaaccaatattgataacaaaccggcgttgacgaagtaattttgtgataccgcctgatgaggttacgttcatcaggcctgcaaacctctcccccgccatttggtacgaatttgcctgatggcgctacgtttatctggcttacaggcacgcctgtgcttcaggtgtggtacggctttcacaccgttatccggcaaaagaggctaattatctaccagccgatttttcggcgcgctggcggcgtaatgcttttggatcggcgattaagggacggtaaatttcaacccgatcgccatcctgcaccgtatcggtgagttttaccggacgactgtagatacctactttatttttcgccagatcgatatccgtgcgcaattccagcaagccggaagcgcgaatcgcctcttcgaccgtcgcgccctcctccagcgttacgcgctgcaaatactgcttttccggcagcgcataagccacttcaaccacaagtttatccggcacggtaaacctctttggcgcgaaccgtaaacgcctgcaccatgttggacgctaactctttgaatatacgaccaaacgccagctcaatgagtttattggtaaactcaaaatcaagctgaaactcaatacggcacgcctcggggctgagcggggtaaatttccagccgccgatcagctttttaaaggggccatccaccagatgcatcagaatgctctggttacgcgttagctgattacgcgtcgtaaacgtcttgctgatacccgccttcgacacgtcaacagccgccgtcatctgtgctggcgatgactccaggacgcgactaccaacacacccaggcaaaaactggggatacgattgcacgtcattcactaactgatacatctgttccgcactgtaggggactaaagcagtccgactaatctgaggcatagcaattcccatcaacataaatcgtgtaaataataccacttatcagcgagtaaaaaaaatgctgtccccaaccgtcatgccttaattgtgcgtgcatagcccaactcatgctaagatagatttttgcacctcatcaggacgtaatggggtgttttcgatatcagattacctatgaattcacgacacttatgacgaagaaaaaagcacataaaccgggctcagccaccatcgcgctgaataagcgcgcccggcacgaatactttatcgaagaagagttcgaggctggtctcgccctgcaaggctgggaagtaaaatctctgcgcgcaggaaaagccaatatcggcgacagttacgttatcctcaaagatggcgaggcctggctgtttggcgcaaactttacgccgatggcggtcgcctcgacacatgttgtatgcgacccaacccgaacccgcaaactgttgttaaatcagcgtgagcttgattcgctgtatggccgtattaatcgtgaaggttatactgtcgtcgcgctttctctgtactggaaaaatgcctggtgcaaagtgaagatcggcgtggcgaaaggtaaaaaacaacatgataaacgttccgatcttaaagaacgtgagtggcaactggataaagcacgcattatgaaaaatgcaggccgataatagacattttttgtgaccagcttctcagtatgaagctggtcaatgttcatatctcatgcatgcctcgaaaatatattctctgtgtctgacgcttatcaatagcaataaataccacaacaagaatatattctttgtttaaaaatttttatagtctaataacacaatacttcaaatgatttttataaaatttaatattgctgaataccttcacaaaaagtattgtttttatgttaaaagagaaaaagaagaaaaaattaaaattcattataaaacataaagataaataaaaaattatcatgtattgttagcccaccctacatctccttaacacaaactccgttatatttcagacgcactaacacctttatcaatagatcttaatttgcagaaagatttttttctgactatatcatctaatacgaaagcactagtcaggcacaaaaaacaaagggttattcggcgagaaaaccagacctccacctacgctcataaaaaagaatatggctacggaaattcatctctcacgatgaacgggaaggctcgtctacgcattttgccctgaacgttgtgcccgttaattaatacacagagcaaatccatcaggagctgatttatgcgtctactcgccgtggtttcgaaattgactggcgtctccaccactgtggaatcctcagcggtcactcttaacgccccgtcaattgttaaattatcagtggcccgggaggaaattagtcaacttacgcgcattaatcaggatctggtggtgaggctccattccggcgaaacgatcacgattaaaaacttttacgttaccaacgatctgggcgcaagccagttagtactggcggaaaacgatggcacgttatggtgggtagaaaatccgcaagccgggctacattttgaacaaatcgctgatattaatgagctgctggtcacttctggcgcttcccatgaagcaggcggcgccgtttggccgtgggtactggctggcgcggtggcggctggcggcattgccgctatcgcgtcttccggcggcggcgattcccaccatcattcggatggcgataatccgccccccgataacaccaatcctgacggtaatccccctgataacagcaatcccggcggcagtacccccaacggcaatactccaggtagcagtaatcctgtagatactaccccgcctctcgctcccggcgaattattgatttcagcggacggaaaaacggtaagcgggcaagccgaagcgggcagtaccattaccatcaaagatccctcaggcaacgtcgttggcgagggcaaagcggatagcgacggtaaatttagtattgatctgacagcgccacagattagcggcgaacaacttaccgtgaccgcgactgacgatgccggcaataccggcccatcggcaaccattgatgcgcccaacattcctctccccgatacaccggttatcaccgccgctatcgatgatgccgctcccctcaccggcacgctgagcaataatcagtttacgaacgacaatacccccactctggagggcaccggcagcgcaggcacagtcatccatatttacgccaatggtcaggaaataggctcaacaacggttgataccagcggaaactggcattttgccattaccagcgcgctagcggatggggaaaatcatttcaccgccattgcgactaacgtgaaaggcgaaagtagcgaatcagcccgctttacgctgactatcgacacactcatccccgatgccccacgtgttgaactgattgccgataacaccagtttgctcaccgggccgctacagaataatgaccgaactgacgaggcaaaaccgctattttccgggcagggagacgcaggcaataccatcacgattaaagaaggttcaaccgttatcggcagcgctaccgtagacgaaaatggacgctggacctttacgccgactacgccgttaagcgatggcgaacatacctttaccgtcgaacaaagcgacaaagccggaaacacgagccgcgtgacgacaacgcctactatcattgtggacaccacgccgcctgacgccgctatcattgataatgttgcgaaagacggcacaaccgttagcggcaccgctgaagctggcagtactgtgtcgatctatgacccggcgggaaattacctgggctccacgattaccggagaaaataaccacttcagcatcacgctgaatccggctcagacccacggcgagcgtctggaagcgcgtattcaggacgccgtcggtaacatcggccccgccacggagtttaccgcttctgactcacagtatcctgcccagccgactatccttaccgtgacggatgacgctggcgccgttaccgggctgctgaaaaatggcgatgccacagatgataaccgcccaaccctcagcggtactgctgaaccaggcagtacgatatcgattaacgataatggctttcctgtagcgacctttccgcccattgtcgctgacgctgacggcaaatggagctttaccccctcgctggcgcttgccgatggcgaccatgtctttaccgctaccgcgaccaacgatcgcggcaccagcgggcagtccgtctcctttaccattgatatcgacacgcagccgccggtgctggaaggcctggcggttagcgacgtcggcgacagactcaccggcactacggaagctggcagtactgtggttatcaaagacagcctgggaaatacgctcgggagtggaacggcaggcgacgacggtaccttctcaataggtattagcccggcgaaaattaacggcgaaacattaagcattagcgttaccgataaagccgcgaatagcggtccggtagaaacgctgaacgcgccggataaaactgcgcctgcggcaccggacggtcttaccgtggcgaccgacggtctgtccgtaagcggtcaggcggaagccggggcaacggtcactatccgcgacagtagcaacaccgtacttggcagcgccgtcgctaatggcaacggacaatttatcgttccgctgaatacggcgcagactaacggccaggcacttatcgctaccgccaccgatgtcgcgaaaaacgaaagcgccgccgcgacggttatcgcgccggacagtaccgcgccggaaatgccgaaaaacgtggtaattagtgaggatggcaccagtatcagcggcaccgccgaaccgggtagcgccatcacgatcgccacgccggacggcaagccgcttggcagcggcaaagcagatggcgaaggtcattttacccttcccctcgtccccgcacagaccaacggcgaacaggttaccgtcaccgccaccgacagcgccaacaacgtcagcccgccaaccacagcgcaagcgcccgatatcaccgccccggataagcccattatcactcaggtactggacgatgttgaaagcttcaccgggccgctggttaacggacaaaccaccaacgacaaccgtcccacccttagcggtacggcggaggccggcgcgcgtgtcgaagtctttgataacggcttttcactgggactcgccacgctacagcccaacggtgcctggacgtttacgccgtcgcaaaatttaggtgaaggcgcgcatcgactgaccgtaatcgcaaccgacgctaaaggcaatgccagtcaggccgcgtcattcgacctggtggtcgatacgcaatcgccgcagcaaccggtaatcaccttcattacagatgatgcgccgggtattctcggtagcgtcgcgcatctggggctcactaacgacagcacgccaacgattaatggtacaggtgaaccgggttccacagtacacctgtatcagaatggcgcccggatagcagatattatcgtcggtaattccggcgtctggagctacgcttacaccacggcctcgccactggcggacgacacctacacctttaccgtgacggccagcgacagtaacggcaacaccacgcctttttcgaccgattttacgattaccattgatacccaggcccctgccgcccccggcgttatcggcgtagctgacggcgacggaaatacgattgataccaatcagattacccaggaatcccagccccggttgagcggtagcggcaccgcaggcgacacaatcatcctttacgataatggcaatgccataggtcaggcgctggtcggcacggacgggcgctggcagtttacgccgcctgccgcgctgggcgacggcgaccaccttctgaccgctcgcgccaacgatccggcggggaacgaaagtcccgaatccatcagctttaccctacgcatcgatacccaggcgccggatgcgccgcagatcgtgtcagccgccatcaccggcggagaaggcgaggtgctactggcaaacggcagtattaccaatcagcgtatgccgaccctcagcggcaccggcgaacccggcaccatcatcaccctgtacaataacggcgtagaactggctaccgtccaggtcaatccacagggtagctggacctatccgctaacccgtaatctgagcgaagggttaaacatcctgacggccaccgccacggatgccgcaggcaatagtagcccgacctccggcgttttctccgttacccttgatacccagcctccagcgcagcctgacgcgccgctaatcagcgataacgtcgcgccggttattggcaacatcggcaataatggcgcaacgaacgataccacgccgaccttcagcggcacgggagagatcggcagcacgataattctctacaataatggcagtgaaattggtcgcacaacggtaggcgataacggtagctggaactttacgcctgcggcactgacgccagaaacctataccattaccgtcacggaaaccgatagagcgggcaatatcagtccaccttccgcctcagtcacttttacgctagacaccactgcgcccgccaatccggttatcacttttgccgaagataacgtcggcgaagtccaggatactattgtcagcggcgcaaccactgacgacaatacaccggtcattcacggcactggcgacatcggcagcattattacgctctataatggcagcagcgttttaggcgtagtcaccgtcgatgagaccggcacctggacgctgccggtgaccagcgcgttgccggatggcgtctacaccctgactgccattgccgccgatgccgccggaaacagcagcggcgtatcgaacagctttaccttcaccgtcgacaccgttccgttgcagccgcccgtcgtcaatgaaatccttgacgatgttgcaccagtgaccgggccattaaccgatggcgcctttactaacgatcggacgctgactattaacggcagcggcgaaaacggcagcaccgtcacgatttacgacaatggcgtggcaatagggacggcgctcgtcaccgacggggtctggacattcaatacgcccgaattatcagaagccagccatgcgctaaccttcagcgcgactgacgatgctggaaataccacggcgcaaacccagccgatcactattaccgtggatatcaccgccccgcccgcgccaacagtccagacggtggatgacgatggcacgcgcgtcgccggaattgccgacccttacgctaccgttgaaattcatcatatcgatggcaccctggtcggcagcgctgtcgctaatggcaccggtgaattcgtcgttacgctcagtccggcgcaaaccgatggcggtacgctgacggcaattgctatcgatcgcgcggggaataacggcccggctacgaattttcccgcttccgacagcggtctgcccgccgtcccggccatcacggcgattgaagatgatgtcgggagcgtacaggggaatattgcggcgggcggcgccacggacgacaccacgccgacgctgcgcggcaccacggatatcggctctaccgttgaagttttcattgatggcgattcggcaggctttgccaccgttgacgccagcgggaactggatctttgagatcgcgacgccattaagcgaaagcacacattacttcaccgtccaggcaaccaatgcgaatggcccgggcggcctgtccgcaccggtcgggatcactgtcgatcttagcgcgccggcgcaaccggttattaccagcgcaacggatgatgtccccggcatgaccggtacgctggataacggcgcgctcaccaatgattcacgcccgacgctcaacggaacgggagaagctggcgccacgatccgcattctggataacggcgtagaaatcggttccgccacggtagatcaaagcggcaactggcgcttcaccccgaacgcgccgctggagagcaacgcgcacatctttaccgccgtagcgaccgatcccgccggcaatagcggccagccttcggacggctttacgctgaacattgacgcgcaggcgccagatgtgccggttatcacctccgtgattgacgataacaatcaaccgaccgttccggtgttaccggggcaatccaccgacgatcggcagccaatactgaacggaactggcgaacctggcgcgacaatcaccatttttgataacggtacgccgcttggcacggctcaggtaggcgaaaacggtagctggaccttcccggtgccccgcaatttgtcagagggaagccataatctgacggttagcgctaccgatccggcgggcaataccagcgcggtctccgcgccgtggacgatcgtggtcgatattacgcctccggcgatcccggttctcacctccgtcgtggatgaccagcccggaattaccggcaacctggttagcgggcagctaacgaacgatgcgacgcccaccctgaacgggcgcggagaggcaggcgcgacgattaatgtctatcttgacggtaatcccgcgtccatcggtaccacgacggtgaatagcgacggcacgtggagtttcacgccgcagacgccgcttgcaaacggtagccacacgttcacccttagcgccaccgatccggcgggtaatagcagcgcggtgtccagcggatttgtgctgacgattgacgccacaccgcccgccgcgccggttatcgccagcgtggcagacaatacggcgccggtaacgggcatcgtccccaacggcggctcgacgaacgaaacccgaccaacactctcgggtaccggtgaggcgggtacaaccatctcgatttataatggcagcgcgctggtcggcacggcgcaagttcaggccaacggtagctggagctttacaccgtctacctcgctgggcgcgggcgtctggaacctgacggcgacagcaaccgatgcggcaggcaataccagcgccgcgtccgaaatacgctcgtttactattgataccacggctcccgccgcgcctgttattgatacggtctacgacggtacgggccccattaccggcaatctgagttcaggacagatcacagacgaggcgcgccctgtcattagcggcacccgtgaaaccaacacaactattcgtctctacgataacggcacgctgctggctgaaattcccgccgacaatagcagtagctggcgctacacgcccgacgcctcgctggcgacgggcaaccatgtaattaccgtcattgccgttgatgccgcaggcaacgccagccccgtttcggacagcgttaatttcgtcgtcgatactacgccgccgctgacgccggtaatcacatcagtcagtgacgatcaggcgccaggcctcggcacgatcgcgaacggccaaaataccaacgatcctacgccaaccttcagcggcaccgcagaagccggcgccacgatcacgctctatgaaaatggtacggtcattggcacgacaacggctcagcctgacggcgcgtggagcgtctccacctcaacgctggcaagcggaacgcacgtcatcaccgccgtcgccaccgatgccgcaggaaacagcagcccgaacagtacggctttcaccctgacggtcgataccaccgcgccgcaaacgccaatcctgacgtccgtggtggatgacgtcgcgggtggggtcacaggaaatctcgctaatggtcagataaccaatgataaccgccccacgctgaacggcactgccgaagcgggcagcgtggtcagtatctatgatggcgacactctgcttggcgtcacctcggctaacgcgagcggcgcgtggagcttcacgccgacgacagggttaaacgacggcacgcgcacattaacagtgaccgccaccgacccggcaggcaacgttagcccggccaccagcggttttactatcgtggtcgatacccttgcgccaacggttccgcttataaccagcatcgttgatgatgtcccgaacaacaccggtgccattggcaatggacaatcgaccaacgacacacagccgacgctcaacggtactgcggaagccaacagcgcggtaagcatcttcgataatggcgcgctggtcgcgaccgtgaacgccaatgccagcggcaactggagctggacgccaaccgccgcgctcggccagggaagtcacgcctatagcgttagcgccgccgatgcggctggcaacgttagcgccgcttcgccatcgataacgattatcgtggataccattgcgcccggcgcgcccggcaacctggtcatcaatgctaccggtaatcgcgtgacgggcaccgcggaagcaggcagtacagtgacgattacctctgagactggtgtggtactgggaaccgccaccgccgacggtacaggcagcttcaccgccacactcacgcccgcgcagaccaatggtcagccgctactggcatttgcccaggataaagcaggcaacacaggcattgccgccggatttaccgcgcccgatacgcgcgtgccggaagcaccgatcatcaccaacgtagtggatgatgtgggtatttataccggcgctatcgccaacggccaggtcactaatgacgcacaacccacattgaatggtaccgctcaggcgggcgccacggtgagcatttataacaacggggcgctgctcggcaccaccacggcgaacgccagcggaaactggagctttaccccgacaggcaatttgaccgaaggcagccacgccttcaccgccaccgcgactaacgccaacggtacaggcagcgtctccaccgccgcgacggtgattgtcgatacgctggcgcccggtacgccgtcaggtacgctcagcgccgatggcggttcactttccgggctggcagaggcaaacagcaccgtaaccgtcacgctgacggggggcgtgacgctcaccaccaccgctggcagcaacggcgcatggtctctcaccttgccgacaaaacaaattgaaggtcaactcattaacgtgacggcgactgacgctgcgggtaacgcctctggcacgttaggcattaccgcgccggttctgccgctggcggcaagggataacataaccagtcttgatctgacctctaccgccgtcaccagcacgcaaaactattcggattacggcctgctgctggttggcgcgcttggcaatgtcgcctcggttttgggtaacgataccgctcaggttgagttcaccattgctgaaggtggtacgggcgacgtcaccatcgatgccgccgcaacgggaatcgtgctttcgctgctcagtactcaggagattgtggtacagcgctacgacaccagcctcggcgcctggacgacgatcgtcaacaccgcccttggcgacttcgcgaatttgcttaccctgaccgggagcggcgttaccctgaacctgagcggcctgggcgaaggccagtaccgggtactcacttataacaccagtctgctcgctaccgggtcatataccagcctggatgtcgatgtacaccagaccagcgcaggtattattagcgggccaaccatcagtaccggcaacgtcatggctgatgataccgcgccgacgggcaccacggtcaccgccatcaccaacgccaacggcgtcagtacgccggtcggcgcgggcggcgtggatatcctggggcaatacggcacgctgcacattaatcaggatggcagttacacctacacgctgactaagcccacggcgggatacggacataaagagagcttcacctacaccatcacccagaatggcgtcggtagcagcgccgcgcaactggttattaatttgggtcccgcgcctgtaccgggcagcgtgatagcgacagacaataacgcctcgctggtctttgatactcacgttagctacgtcaacaacggcccctcgacacaaagcggcgtcacggtattaagcgtcggacttggtaatgtactgaacgcgaatctgcttgatgatatgactaatccgatcatctttaacgttgaagaaggcgctacgcgaaccatgacgttacagggaaccgtcggcggcgtctcactggtttccacgttcgatctgtacgtttatcgcttcaacgatgccattcaacaatatgagcagttccgggttcaaaagggctggattaacaccctgctgttagccggacagtcccagccgctgaccctgacgttgcctggcggcgaatacttgttcgtgctgaataccgccagcggcattagcgtcctcactggctatacgttggcgatttcccaggaccacacctatgccgttgacagtatcaccgccaacaccaccggcaacgtactgaccaatgatgtcgtccctacggacgccctcctcactgaagtaaacggcgtggcgattgcggcgaccggcacaacggaggtaaacgggctgtatggctcgctcatcattgacgcaagaggcaactatacctacacgctgaagaacggcgtcggcgccgacagcattaaaacgccggacagctttatctatacggtcaaagcgccaaacggcgataccgatacggcctcgctcaatatcacgccaaccgccagggcgctggatgcgattaatgatgtcagcgataccctcagcgtcgccacgcttcaggataccgctgcctggctggactccagcgtcggcagcgccagttgggggctactcggcaaatcgggcagcgggagcggcacctttgacgttgcaacgggcaccgtacttaaaggcgcgtcactggtttttgatgtctccacgctcattacgctgggcaatctgaatattagctgggccattcaggagaacgggaccgtcatacgcaacggaaccgttccggtggcgaatatcacgctgggcagcgcgacggtgaccgttaacctgagcggcctggagctggatgccggaacgtacacgcttaactttaccggcaccaataccctggccggggcggcgacgatcacgccacgcgtcatcggcaccaccgtcgatctggataattttgaaacgtccggaacgcataccgttctcggcaatatttttgacggcagcgacgcggcgggggcgatggatcagcttaatacggtgaatacccgcctgagcattagcgggtataacggcagcgccgccacgctggacgccgcggcgaataccaccagcgccacgattcagggacattacggcacattgcaaattaaccttgatggcgcttacacctacaccctgaataatggcgtcgcgatgtcgtccatcaccagtaaagaggtctttacctatcaactggatgacaagatgggtcatacggatagcgccacattgaccattgatatggcgccacaaatcgtcagtaccaaccaaaacgatgttctcatcggctccgcctatggcgatacgctgatttaccacctgttaaacggcgcggacgcgaccggcggcaacggcgtcgatcgctggcaaaacttctctaccgcgcagggcgacaagatcgatatccacgaactgctgaccggctgggatcaccaggcggcgacgctgggtaactttgttcaggttcataccagcggcgccaatacggtgatatccgtcgatcgcgacggcaccggcagcgcgtttaaatcaaccgaccttgtcactctggagaatgtgcagctcacgctaaatgatctgttgcagaacaaccacctgataaccagcggttgataaaaaagccccgaacgccacgacgttcggggcaacaagcggtgatatttaaaagggataaactatgggaagagtcgcgcctgtcgccatcgtactggcatttgctttgtttcatcaccagccccggggcgcagaagcgccgccaatgattacatccgaaggattagcaacggaccagatgcttccttcgctggatggctccgccgctgagttgccgctcagcgccgccgcgccgggcaacctgacgctcaatgacgcggtcaatcgcgccgttaactggcatccttctattcgcgaagccatcggcaaactgctcgcacagaatgaacaaatagaggtcgccaaatcgaaatattatccgcaagtcagcgctggcgtgaacaatgggtacagcaatacctacaccgatcacgggtatagcccctcgctagtgctgtcggtatcgcaaatgctttatgacttcggcaaagtggcaagccaggttcgcgccgaaaccgcaggcgcagcgcagcaacaggccaatgtgttgctcagtattgataccgtcgcgcacgaaaccgccaacgccattgtacaaacgcagagctggcagcaaatggtagaagcggcggaagaacagctcgtcgcgctggacagcatcggtaaacttatccggcagcgcagcgatgaaggcgctacgtcgctctctgacgtggtgcaaaccgaagccagaatcgaatccgcccgctcgcaactggcgcagtatcaggccaatctcgacagtgcgaaagcctcactgatgagctggctgggctggaattcgcttaacggcatcaataatgacttcccggcgaaacttgctcgcagctgtgagacggcgactcccgacgatcgactggtgcccgcggtactggccgcctgggcgcaggccaacgttgcgcgggcgaatctggactatgccagcgcgcaaatgacgccgacgatttcgctcgaaccttctgtacaacattatcttaatgataaatatcccagtcatgaagtgctggataaaacccagtattccacctgggtaaaagttgagatgccgctttatcagggcggagggctgactgcccgacgcaacgccgccagccatgcggtagacgcggctcagtcgaccattcagcgcacccggcttgatgtccgccagaaactgatggaggcgcgcagccaggcaatgagtcttgccagcgcgttacaaatccttcgtcggcaacagcagcttagcgaacgtacgcgcgaactgtatcagcagcaataccttgacctcggttcccgcccgctgctcgacgtgcttaatgcggagcaggaagtttaccaggcgcgttttgccgaactgcaaacggaaagccagttgcatcagttgcaactgaactgtctgtataacaccggcgcgcttcgtcaggcgttcgcgttaaatcatcgcagcattcaatccgtggagatccagccatgacccgcgccgcccccgatgtagaagaggtactcagtgagcgcgcgctaagccaatgggcgcaggccatcagctatgtcgccggtcattatcgcgttgcctgttctcccggttcaattcaggccaacgccccgtggcttaggggtaaaagcagaacgaccgccttaacgcagctcgcgcggcaggcgggtttatcctttcatgcgccggacatagacaaaacggcatttagtcagtggcgattgccgttggttgtcgagctccgggacgggcagttattggtcatcgaacatgttaatggcgaagaggcggtagacgtttttgtgattgaagaagagggtcagcgtaaccgcctgacgctcagcgagttattgccggagatcctctatgttgccgcgctacgcccgctatcggcgctcaaggatagccgcgtcgaccgctatatctcccgctttaaacccgactggatgcgcgagctggttctgcaggatattcgcccttatttaccggtaatggtcgccgcctttctgattaacgtgctgtcgctggccgggattgtgttctctatgcaggtttacgatcgggtgatccccgctcagtcatatcctaccctgtacgtgctctccttcggcgtgctggtagcggtgctgttcggttttctgctgcgtgaagcgcgtacgcacattatggacgtgctcggtaaacgcgccgatatgcgcatttccgatcgggtattcggtcacgcgttaaggctgcgcaacagcgctattccccgttccaccggcagttttatctcgcagttacgcgaactagagcagatccgcgagatgattacctcttcaacgctggcgaccattgtcgatctgcctttctttttcctgtttatgatagtcctggcgattattgccccaccgctggcatggatagcgcccgtggcggctctgctgatgatcctgccgggcgtcgcactgcaaaaaaaactggctgtcctcgccaaccaggccgcccacgaagcgacgctacgcaatgcagtcttggtcgaaagcgttcaggggctggaggatattaaactgatgcaggcggagaaccgctttcttcagcagtggaatagctatatccgtattaccggcgagtcgggtctacgcacccgcaaactcacgcaagggcttatcagttgggggatgtcggtacaaagtctggtgtatgccgcagtgattatgttcggcgcgccgatggttattgaaggcagtatgactaccggcgccgtggtcgccgcgtcgatgctcggctcgcggatgatcgcgccaatggctaacctgtgcggcgtgctggcgcgctggcagcaggtgaaagcggcgaagatgggtctcgacaacattatgcaactgcccaccgagacacagcatgacgatagcctgatacaccgcgacatcctccacgggcattacctctttgaaaacgctcagtttcgttaccataacgacgatcaacgcataccgttgcgcctcgtgcgtctggagatcatgccaggcgagcggattgcgatactggggcgtaacggtgcgggtaaatccacacttttacaggcgatggcgggcggcctggagatgattcagggagatgcccggcttgataatctcagcttgtcgcacatcgatatggcggatttacgccgcaacatcggctttcttagccagaacgcgcggcttttcttcggcaccctacgagagaacctgacgctcggcgcgccgcacgccaacgatgaacagatttttgacgcgctcgaagtcagcggcggcgccgtcttcgtcaggcggctggcaaaagggttggatcatcccattatggagggtggtaacggcctgtccggcgggcagcgtcagtccctgttgctggcgagaatgctgctgcgctcccccaatattgtgctacttgacgaacccagcgcctcgctggacgagcatacggaacgagagtttattcagcggttacatcagtggcttggcaatcgaaccctggtcgtcgcgacgcaccgggtaccaatactggagctggttgagcgtgtcgttgtcctgaaagaaggacaactggtgatggatgcgccaaaagcgcaggcgcttaacgcggatcggatgcaaagtcaccgtcgggagtggaaaaatgaaaatcaatcagcatgatgccgcgatggacgatcccgatattcagcgtgaacgggcgttttccggcgcgggtcgtattgttctgatctgctcactgttatttctcattctcggcatctgggcgtggtttggccgactggatgaggtttccaccggcaacgggaaagtgatccccagttcacgcgaacaggttctgcagtcgctggatggcggcattctggcacagttgacggtgcgggaaggcgacagagttcaggctaaccagattgtcgcccggcttgatccgacgcgtctggcgtccaatgttggtgaaagtgcggcaaaatatcgcgcttcactcgcctccagcgcacggttaaccgcggaagtcaacgacttacctctcgccttccccgctgagctgaacggctggccggatctgattgccgcagagacgcgtctctataaaagccgccgcgcgcagctggccgataccgaagccgagctacgggatgcgctggcgtcggttaataaagagctggccattacccagcggctggagaaaagcggcgcggccagtcatgttgaagtgctgcgcctgcaacgacaaaaaagcgatttaggcttaaaaattaccgatctgcgctcacaatattatgtgcaggcacgcgaagcgttatcaaaagcgaacgctgaggtcgatatgctctccgccattttaaaaggacgcgaggattccgtcacccgccttaccgtgcgttcaccggtacgcggcattgttaaaaatatccaggtcacgacgattggcggcgtgatcccgcctaacggcgagatgatggagatagtgccggtagacgatcgtctgctgattgaaacccgcctttcgccgcgtgatatcgcctttattcatcccggccaacgcgcattggttaaaattactgcttacgattacgccatttacggcgggcttgacggcgtggtggagaccatttcaccggataccattcaggataaagtgaaaccggaaattttctactatcgcgtatttatccgcacccaccaggactatctacaaaataaatcaggacgccgtttttcgattgttccaggcatgatcgccacggtagatatcaaaaccggtgaaaaaaccattgtcgactatttaatcaaaccgtttaatcgcgcgaaagaagcgctgcgcgagcggtaaatcgttgaagataagaagatacgggggctggtcacgcgtgtcacaagtctgttatacttaccttacacattggggctgattctggattcgacgggatttgcgaaacccaaggtgcatgccgaggggcggttggcctcgtaaaaagccgcaaaaaaatagtcgcaaacgacgaaacctacgctttagcagcttaataacctgcttagagccctctctccctagcctccgctcttaggacggggatcaagagaggtcaaacccaaaagagatcgcgcggatgccctgcctggggttgaagcgttaaaacgaatcaggctagtctggtagtggcgtgtccgtccgcaggtgccaggcgaatgtaaagactgactaagcatgtagtaccgaggatgtaggaatttcggacgcgggttcaactcccgccagctccaccaaacattcattcatgatgcatcatgaaccttaaaaaagcctgtaacttcaatgagttgcaggcttttttgttgcatgtgtggtcatgatctctgtatgaatcttgagcttttggcaccatgtttagcaccacggtatcgtggggctaaaaaagcgtggtgctaaaacatgcctaaccaactgaaacccttaacaaatgtggagatcgctggcgcgaagccccgtagcacagactatgagctacgggacggtgaaggcctgtacttgctggttaagacttcagggaggaaggcctggcatttcgagtattatcatcccgtcaccaaaaagcgcaccaaaaccagccttggcccttacccggtcgttacactggccatggctcgcgaaactcgcacgaaatacagacgactgctctatcagggcatcgatccccgtcaacacttagcaggaatagctgaagaaaaacgcatccagaatgaatgcacgctggaaaaagttgcggaacagtggctcaaagagaagaaacggaccagcgatcttagcgaagatcacgccaaagatgtctggcgctcgctggagatgcacgtcttcccctctctgggtaacacacccgttaccgagatccgcccgaagatgctcaaggaacacctcaccccgctggaagaacagggcatcctcgaaacgctgcggcgagtcatctcacggcttaatgaaatcttccgttttgccatctccgaagagctcatcgaattcaatccggctgacaacctggtcgcccgcttcaagaaaccaaaaaagcagaacatgcccgcccttcaccccagtgaactgggcaggctaatgctggcgctacagaacgcttctatccgcaaggaaacccgctgccttatcgaatgggagctactgacctgggttcgccccggcgaggccgtcagcgcccgctggtgcgacatcgacatgaaaaaagcagaatggcgcatccccgatacctttatgaagatgaaccgttcgcacacggtgccgcttagcaaacaggcgctgcgcgttcttcagatcatggagcccgtcagccgccatcgtccgtgggtcttccccagcatccgcaaaccactggagcatatgcaccagcagaccgcgaacgccgcgcttatccgcatggggttcggcggcgaactggtcgcccacggcatgcgcagccgccaggaccgcaggcgcaggtcattttccccgtgaagtcctggaatctgtgctggcacaccagaaagaagacgagatcgaagcggcctacaaccgcagcgactatctggaacaaaggcgaccgctgatgcagtggtggggaaactacgttgatgccgccagacggcaggcgctgctcggtgcagaagaaccgctgcaaatcgtggaaggagaataatgtgaccagtcccattcgtcagaatctgtttgaacgggaatgtgatatgccgcttctggaagcgcggcatctcgcccttctgcttctaggcctcgatgcttcccaacctgcaaacgccctgccggaagaacatcaggaaaactaccgtatcctgcacgacgccatcagccggaccattaaggcaacaggcatggtcagtgccccggcgaacaagcgcatgttctatgccgatgagatgtttgccctggcctggcggcttattgatgacgaactgacgccgtcagaagtaaaagaccgtagcctgaaggcggtgatgaaactgtcgcgtaatagccgtggccgcaagtggctgaagacgctcggcgacgacgcactaccggatctcacggcttcaacacaaccttccctgcgtggaatgcataagcgcgacaaagcacgggagaatactgcccgactctgctggctgctggttcagcttctggttgaggagactgatgggcgttatgggacgtcggataaaccggcttctgaccagatacttcgaaagctgaagacgctggctaaggaacaggaattgccgtcggatgggcttggacgggggacattttatgaggtgttgaagatggaaagagaaaagtgagtataggtaattgatatctgtgtaagatgcagcgaaccgaataaaatctgaaagctcagacgtatagtctgcttcgtcctgtgagttcaataggttgatgcaacgctatccttaatcaagggggacgttgcttgtgtaacatttaatctacggatattggtcattaatgcgggttgatgttgtactgtcatgattgagcgacctcaggttgagggtggggctcacttatatacgtgtatccattattagtaggtaaattcatgtatattggctacctaatttagccactcctccgcacatagttaactcctgatttgagatagagagggattatgatgctaggaagatttattgcttagcatatagcaggtgatcttttacctactggagtggtaaattacccctatttttcagtgaatgttttgtcagggagtattaatttcgtggaaaacgataaggtgaagttaggaagaaatgataaatgctggtgcaaatcaggacttaagtataaaaaatgccatctcgatcgagaccgtgaaatgccggtatctaaagccgaagccctgaaattttcaaagtctaattcgcagagaaaggcgtgttatgcaccagcatccatgcacgaagattgtgacaaacgtatcgttcaggcgcacacgctttctaagagcagtagccttaaggcgatcgccgactctagtaatcatgttatgggagtggtaatgaacctgccgagcctgataaaaaacaacggaagatgggttccagagaagattggtatcaatcaggcatccacttttaccggattttgtgcagttcatgacagaatattattttcatgtctagagaacgaaaaatttacaggcacggatgagcagtgttttgccctaatgtttcgttcgttatctaaagaaatttacgccaaggaggggggaagacggtcttccgattttgctaaaaatgccgataaaggaaagttacaggccgaacaagtctatattcaggaatttgtcagcctgcatcaaagcggtttgaatgcagcaataactgaactaaataatcttaaaactagcctcgaccgcattctgcttaacagacagttttcagaaattgaaagtgttgtcttcacgttttcagaaccattacccattgcggtttcgtcaattctttcaccggagagggattttgatgggaccaaaattcaggatttgaacgatcttaccgtgtcggcggaacaggtctgcttcaatgctttttccagcgaaggtaagggatatgtagtgttcagttggctgggaacttcagcaattatcagacgttttgtgcgatcactaattaaggttcaaactgacaggattttcaacaccctcctgtattttttcttcacaaaagctgaaaatacatactcatctcctgagtggtgggacagcctcagtgacaaacagcgagagaatatcggcaatatgattatgtcgggtgttgacttttttgataattctacattacgcgtcgatcattcagttgattataactctgctgcgcttgcagagataagatacagcaacagcgagatttccagttgaatgctttaatgccattagaaaaaacgggccaatcagttgtaccgaaattgtaacgataagatgtcaccgccttttgctgccagatcggcatctttcgacaaactgatgtaggctgctgatttccgcttaagcggaggttatcaggttagggatgctatctgcagataggctatagtaactgggtactctccccaattgtaattgacctgctctccgttaatgaacaggtcacaatcgttgtaatgcggccattaggagtttccatcgtagtattttatccagtcacaatcggagtaaaaaataaacatatattctatcaattcactcattaaatttaatctagcctacatacaccagctggttttattttttcagtaatgaaaattaacatatcgatttcattcttcttagggactaacatcgaaaccccatgtacaagactatttctaacctcagtaatttttttaataaaagttgcatcttgcctagaaattattttgttttttactaaagcattgactactttccctataaaaagagggcgattaggttgtttagccgaaaaaaccttatgccttgcaattttttcaaaattaatccaagcagagatgaaacaagtaaagccagatacaaacatatattcttcatgatcaatgtctggcaggtgcccaacaactgaacgaatcatgtcatctggtaagttgaaaagttcacgttcaagatctttcgctacaataactccagtatcaattaagttaaaatcactttgcaaaacaattaattccttgtgcaactgcggtaaggaacccttatatttatcatttaagacaaagtaatattttttaataggacatatatcatgccagtaatcccttaacccttcaaaatcatcttttattttattaacagcagctagtacattattagatgcatcttctggtgcatacacctgataatataccccctgccccttaataaaaccatcattctttctgtctccaatatttccataaggcttcacctgctgaaaatctggcgacttatagtacattatttttgaaaacaagtcctcaaagcgaactccgtcagactcatagacttggagatgaaacatgtttctagcaatagataatgagatatcatccatagtcaaaccttgcataattagagtaaattcaacaacatttacttatctaagttatatgaaacttggcgttaccacaataacagaaaatattaaattgttagttcttctgactgcccctgttgattaacacaccgcaacttaagtaatgccatcatcagtggttagaacagttaacagcttcctcgcttacaactgacgatgagatagcggcagctattgtgaagtgtttgtagtcgtgcgttgccattcgttaaccatagcaaatattatctcgacggagctcaactggataaaaaccatttattttcaataaattaatctaacaccatcagttttgatggcaaagaaaatcttcccggactctttactttctatccggacttaactttttcacccggacctatacctcccctccccgttccgcgctataaccgcctcgacactctgttcccgtgaggtgcaatcatgaaaatccgtgctgacagtaacgatgcttttcccgaaagcggcaacgtgcgtatgcggcaggtggtccagtttctggcgatgagtgaatcatcggtttaccgcctgattaaagacaccgactttccccgccccgtccacctctcttcccgactggtggtcttcgatgctgcggaaatccgtcagtggcaacagcgccgcaccgtcatccgttaatccacgctcagggatgagccgactgataccccatcatgaaacgcgcgccctttctctgtaagcagtctccggaccgcacgctcgaagtggtgatccttgccggaagcctggcatgggaaacctcacgcgtgtggcgaaaagatcccgaccgggaagatgatgttcctccgatggtactcggcccgaatgaactggccgatctgagcaatctgaccattatcaggcccgacacgctctacgtccgggtacttcgcaccggcgatatcagtgaagaagatctgctgaaaattgccgtaaaactggcgcacgcgggtgtgcagatggcccggctgatgagccctgacggtgagttactggagaactggaccgggcagcttgaacgcctgcgacaggaaaggccttccgatatcctgccggatcacttccgcctcgatgaagaggcgctgtggtttgacaagctcaccgaacggcgcgacggcgaaagcgacgtccagccccagcgcatctgttcccctctgcgcgtcaccgccatcacctgcgacagccatgacggcagctatggccgactgctggaatggcacaccaccaccgggcagttgcggcgctgggccatgccgatggcgatgctcagcggcaacggcgaggagctgcggcgcatcctgctggagaacggtctgaccaatatctccacccgccccgccctgcgcagcctgctgtgcgaatacatctcacggtcactccccggacgccgggtcacctgcgtggagaaaaccggctggcacaacggggtatacgtgctcccggatgaagttatcggtcccgatggcgacaatgtcatccttcagggcagccactacctgactggtggctttgcgcaggcagggacgctggcagagtggcaggagcaggtcgccgcactctgtgcaggcaactcgcgtctggtctttgccgtctgctgtgcgctggccgccccgctgttgcgcctgaccggaacgggtggcgggggtttccacctgcgcggtgagtccaccgatggcaagaccacggtgatgaaagtggccgcttccgtctgcggtggcacggattactggcactcctggcgggccaccgggaatgcgctggagggaattgccagtcgccacaatgatgccctgctgccgctcgatgaactgcgcgaagtggatccgcgtgaagccgggatgattgcctatatgctggcaaacggccagggcaaggggcgcgcccgcaccgacggcgaggtacgcaaccgcaggcactggacgctgctgctgttctccaccggggagctgtcgctggcggaacacaccgaacgcgccggggagcgtatctacgccgggatggacgtgcgcatggtacaaatccccagcgacaccgggcagcatggcgcgtttgagcaactacacggctttgccagcggccagcagttcgccgataccctctgcgacagggtggcccgctttcacggcaccgcctttcgtgcctggctggccttcctcacccacgaccaagacgccagcaccacgctagcgagagagttacttcgccgctaccagaacgccctgatgccggacaacgctggaaaccaggtgcagcgcatcgtggcccgttttgccctgctggcggcggccggagagatagcgacgctgcacggcatcacgggctggcagaaaggcacggcgtatgaggcggtgcagatctgcctgcacgcctggctgaacgagcgcggccatattgccaaccaggaagatgaaggcgtgctggcgcagatcaaacggtttatcaccgcgcaccagtacagccgctttgcctcgtgggatggcccggaccgcccgctgaatatggcaggctttcgccgggtggaaaaagatccgctgacgggcgaggaacacacactgttcttcatcctgccggagggctggcgggaaatatgccggggattcagtcccgccagggcggccagattatgccaggaagcagaatgcctgcagcccggcagcgacgggaaataccagtcgcaggttcgcctgccggagatcggcaaaaccagggtttaccggcttacctcccgcatcctcagtatctgagtgcagtctaacgtgtcttaaaaaaaggtggtacagggtgggacaagtggtacacgcagagctggcgagggttacagcgtcccaccttagagaatttgattaaaaaaaagtggtacagggtgggacagccgttgctaaatctgtcccacttttccgactggcatttttcaggtggtacagcgcaaagccacggctggcgcggttgtaccacttgtcccacctgtaccacctcaaaaacagaatgaatgaaaatggcgaaaagggagtgaaaaggcaaaggctgaaaggaagggagaagaaggggaacggacttgcccgaaaaattccgaaacataaacaacatacgaagttgaagcaataacaacaacgtacatttcaagcgcttagaagcgagatttcacgttacagtaacaatttaatatattgatatcattaactattccccttatcttatattcataatataatcattgctaacattaataaaaagtcgagaactgcaatggaactcagaagaatatctgtaaataatttgttcggaattttaaactatgatattgatttagggaactcagaaacaattattattaccggaccaaatggttacggaaaaaccatgcttttaaagataattgacaacattttaaataaaaatatagattttttctttgatttgcgatttgaagaaataaaatttgaacttgacaccatattactatgtatagagaaacaaaaaaataagaatgttgcagttacggtagtcgattatgtaaacgataaaaaacgacaggaagtattcactctaaataaaaacaaagaacttgacgtcgattattttgatgaaatatataataaactattaatctgtgacaacatagattctgatcctatactaaaatcttacaatcatgaggaaatattaaattactataaaattaaaaaaataaaacttcataaagaaaagcatcataaaagtgatttcttggataaatccattcctaatgcagagttaacttttatcaaagcgcaaaggatagagaatataaaaaatgaaaaatcagcaatcgagtcacaagcaaatttccttcttgagttgataaaaagagctgctgaggaatcagcacaaataagccaaagacttgactccacatttccagcaagattatttgatagcattaacgaaaatatatcttcaacttctatcaatgacagattgataggcattcagagaaaaagagaactttttatgaagttcgggataataaagtctgaagatacttttatccctagaaaattcagcaatgcaacattaggaaaagagtactcaaccgttttaaatctgtatatttcagatgctttagaaaaactatcaccttatgaagaattatttgaaaaaataaatttatttgttaatttattgaacgaaaaaatgcttgcatttaaagaaatcaagatcagtaacgagcatggattttattttcaaagtgataatggagaaagaatatcattaagtaacttatcttcaggtgagcaaaaccaaatagtcatctattttgatcttatattcaaagctaaacaaaattcagtaattcttattgatgaaccagaaatctctttacatgttgcttggcaaaaagaatttcttgattcaatagcaagaatacaaaaacttaatgagttctctaaaataattattgctacacactcgcctcaaatagttaataataattgggatataacttacgatttattcgagaataacaataaaaacatggagggacaatgaacagcctccgtgatatcaccggtgtttcagactggatatctggaatgcttttgctttttagatcaccaaaatatagcaggaagatttttttcactctagaaggagaaagtgatattagatttcttaatactcattttgcagatgagagaatccattatgattcgccgtgtagtggtaaaccagaagtaataaatgctgtgcaattattgcgctctcatggaaaacaaaacgtatatggtttatgcgatgctgactttgatattttagaaggtaacagctacgaaaacattcattttacggactgtcacgatctcgaaatgatgttaatagaaggtggttcatttgacaaatttatttctgagttcttaaagacaagtatacttagaatacatactcttgaagatatacgaaataatcttaaagaatctataattgacgtgacttacaaaataggaatactaaaatggcttaatttcaaaaataatttattgttaatgtttaaaggaatgaaatacgataacttcataacctttgtggactttagtgcgaatatagacatagataattacattcagcacatcctcgacagaagtcctcgaaaacctccacactgtgatttcaattttttgaaaaaagagtaccaattactttataacaaacaagcagattataaatatgtttgcaatggacatgactttacgtatatcaccatgatggcctttcactcagaattttcccgtgataagaatataactcaagaaaaagttgaatcacatttaagaatagcatactcagcaactgcatttcaaagaacaaatatttataacgaactttcgggcttaatagatagccataatatttaataaattacattcaaaaaaaaatagcgaaatacaccgtttcaataccgaaatggtgtatttttcagaaaaaaaaccaccttcattaaaattaaatataacccattgttttattaaataaaaacacgagtggatgaacaatcaatgcaaataacctcatatattaccagacaatatcaatgtacttccggggttatttttcttaaaacggtgatactggaggatcaattctgcaagctcatcgtcaacagcataaaaatacgcttccggtacatcaagcgctgctgccagcttacagacgagtttgaaatcgggtgcatggacttccttttcatacgaactgatacgcgcgcttgcggattcttcatccagcccagcgagtgcacccagttccgcttgcgtcagatcagccctgactcttgaaatctttaatcttttaccaatcacgattgcaatcctgcacctgaacatgcaggaattatccctctctgggcagcaaccatcttcaggcattcccttacctattcatgtattacttgaattttgattacatttagagcaatattcaagaattgcgtgatttatcacggttaaaaagagaaaaccgatgaaaaagtcaacaaccaaagactggcaccccgccgacatcgttgccgccttacacaagcgcggtaccagtctggcgaagctgtcgcgggaagcgggactggcctcgtcaacattgtcgaataccctgacgcgcccgtggccgaaaggcgagtggctgattgccatcgcgctcgacatgcatccatcagaaatctggcccggccgttacctcaattccagtaacaaacgtgaaccccgaaaaccgcttcacccgatgacaacaaccgacaactccgggacataacgacccgcgctgtgagtggcaggacgcattaaccaacgacacctgacaggagagttgtttatgcacaccgaaccacaaccatgcaccatcgcaccactcgcaggaggccgccatgtttctggtctccctggctgaaggctttatccacctgttccaggccgcaggcaaaatctttctcgacatgatgaccgggcttatcccgatgctcatctgcctgctgctggccatcaatttcctgatgaagctggtcggtaccgtcagaatggagaaggtcgctgccctgctcggccgctcgcgcattctcacctacggcgtgttgccggtgctcggctggttctttatgagcagccccggcgcgctgacgctcggtaagctcttacctgagaagagtaaacccggctatgaagatgcgctcggcaccaccgcccatcccctcaccagcctgtttccccacgtagtgccatcagagctgtttgtctggctcggcgtggctgcgggggttaaggcactcggtctgcccgttacttcactggcgctgcgctatatcgccgccgccatgctaattggcctgatacgcgggattatcaccgagtacctgttcctgcggctcagcaggcgggggaatgcgccatgatgatttactgcgcacgtattactgccatcgggctgtttgtcgccgacggcctcaccgacaagatgctcatcaccttcgacagcaacgggccgaaggactgtctcgattactcgctgtcgctggagccgtcgttccgggaagagagcctgatgatactccccggcgaccgcctgctgctggcagggcatgattatctggtgactgccgtcggcaagggggtacagcaggcgctgtttgaactcggtcatctgacgctggtgtttgacggtgacctgaagccctgccacaccggggcgattcatctctccggcccggtgccgaaactccatgacctgcacggcaatctggtgattgaggagggacggccatgaacacggtacttattcctcccggtcccggcggctacggtaaagggctttggctgcccgttgccagcggcaaaaaggtgctgtcactgaccgggcgcgagattcatccggtggcgatagaaatcggtgcgctcactgaatcggaagtggtgaacggcttctccgatatcccgcctgataacgacatcctgtgcgtggtgattaactgcgccgggtccctgcgctgcggcctgtatccgcagaagggcatcccgaccatcaatgtgctgcccacctggcgcgcggggccgctggcgcagtttattagcgaggataactacgtctccggcgtgacgatagagcaactggttctggtggatacggccgaagcgccggacggtgaaccggagccagtgtctgtcacggcaccacggattatcaccactccgccgcctgcacgtggcgcggaaaaactggttcgcatggtcgagcgtaccggcaccgccgtcggacacgttatcgccctgctgtttgccgccagccgtgaggcggtggacgtgtcgctgcgcaacgttatcccgtttatggcctttgtctcactgctgattgccctggtgcaggaaaccgcactcggcagcctgattgcccacgccctgacgccgctggcgaactcgctgtggggactggtgctgctgtcgctcatctgcggcattccgtttctctccccggtgctcgggccgggggcagccatctcgcaggtcatcggcgtgatgattggcacccagattggcgcgggcgcgatatccccggccttcgccctgcccgcgctgttcgccatcaacgtgcaggtcggctgcgacttcgtgccggtaggtctttcgatgcaggaggcgaagccggagaccatcgcgaagggcgtccctgcctttctgctctcacgtcagttaacggggccgctggcggtcatcatcggctggctgttttccctgggcttattctgaggacatcatcatgaacaaaatcagagccgccgtggtgggtgcaggtatctacggcaaacaccatatgaacgcgtaccgccataacccggacaccgtgctggttgccatctgcgacaccgatacagaacgttgtgacgaccttgccatggcgtacgggatccagggctacacacgactggatcggttactacagcaggaggctattgatatcgtctcggtggcgacaccggatccgtaccataccgaatccatcctcaccgccctgcgccacggtcagcatgtactggcggaaaaaccgctcgccacctcagtacgcgagtgtgagcttatcgtggagatggcgcagcagcgggacctgctggtcggcgtcgatttccacaaacgctgggacccggcagtaatgcgcattaaagccgaactggaaaatccggagaccggatgcatcctgcgcggccatatcagcatggacgacgtgataacggtcccgacgcagtggctgaactgggcgggcgcaagctccccggtgtggtttctcggttcccactgctttgacctggtgcgccacctctccgggcaggaggtggtatcggtgtacgccgtcggacagaagcggctgatggtcgaatgcggcctcgacaccttcgacagcgtgcagagcctgctgacaatggccgacggcagttcgtggggggtggaaaactcatgggtgctgccggagggctttccgaaggacaacgacgggcgcatcgacattctctgcgaggcaacctatatccgcagtacttcccaacatcgcgggctggaaatcaccacgccggccttgacgctcacgcccaacagctatttcatcaactaccgcaacggcgttgccagcggctttggtatcgacccgatcaatgattttgtgcgggcggtcagacataaagccccctacccggtcaccgccgaagacgggctggcggtgagcaggatctgcgaggcggtacaccgcagccttgagagcgggaaacctgaagatgtttaaacaaacggcgcagggtagctccctgtgccagttccatatgattttgctaattctacttactggtctattcactcgtcaggctttggcccgcagatatattaatgttttccatcctgccgcaacaaaaccccacacacgattgtacgttttttagtcattaaggtgaatagcggtattttatggctatgacctttttcaccttcctgccaatagtatcatgctaaacctctcatttatgtttattgcgccaataatagtcaacaagtatttcaaaaaagtcccaagcaaattataatgctggagtttcataatgtccctttaaaaaccattttaagaagagctattatgtccctccctacaaattttaatgatattcttcgtttttttgaaaaagattacgatacagccaaagaagataatgctttaagtgcacgcggccaatttctgcaactttacccccttaatcacctaaaaaaaatgacgcttgatgactatgtcatcggcaaaggtacagcttcattttgtgcttgtgttgaagtaaaaaccagaacatgggcaaatatgcaaggtgcgacggcgctcaaatttggtatttattatggaaaatcaaaatcagatccaaccgtccgctatcgttttactcagaaatttggcgatgatgatattactaataaagaagttttcgctaatgttaaagacgctttactagacctaatacagtcagggaaagaattagattttagagcgattgacgagaaccccctatcccaaatgtttaaggctaaaatattgagcctttactttccagaacactttataaacatttgcagcaaagatcatcttaaagaaattgctatggaaatgggtataaaagagcaacagtttattagtaaatatcaacatttgttattcaagaaaaaactagagcataaaatcacccgaaactggagcaatccaaaatatatgtccttcctttatgcccagttcatacgtaaggatcttagcagcgctcctgctgtgatagttaaaaaaccacaaaaaagaaaccatcccgaagtcaatttcgaagaaataacggacaatcgtgatttaataggcaaaaaaagcgaagaatatgcattaaactgggaaaaaaaccgcctaatcggtctcggctattcaaaactagctgaggaaatagatgatcgccgtaatcgtccaacttatggttacgactttctttcttttaatgccccaggtgatgagcgatacatcgaagttaaatcaattggccgggatggaaaagagggagcattccgttttttcctctcaggaaatgaactcaccgtttctaatttaagtaaccacagtaaaaactattatttttatcttgtacagtatgggaaagatggagagccatgcaatctatatgtaaaacatgctcaagatctttacactaatagtgaaatgtccccttgtgcttacgttgttaggttcgatctggaagaacctgcttaatagtttcgacaacctccggctcataactttaaaagtgtgaaatcaggcgcagagttccccctgcgccttcacctcagtgatgctgtaacaacacctgtgaaatcttcctcgcttcacctgccggatccgccgcatgcgtgatcgctgatcccacaatcactacatccgggcctaacagtgcgtagtccttcacagtctggctactgataccgcctgccacggcaatccgggctttccggcgcaccttcaacatcgttatcaaatcatcaatcggtttgcgccctgctgcctgctggtcggtgcctgtgtgtaccgccagcatatctgcccccgcctcctccagcaggcggactcgtgcggggagatcgtcgacgcagatcatatccaccaccacctgctttccggcctcttttgccgcgcggatgcacgactggatcgtcagcacgtcggtcacacctaacaccgtgacatagtctgccccggcgtcgaaaagcagctgcgattcaaaatggccgccatccataattttcgcatccgccagtacttccttatgcgggtatttttctttaatggctttaatcgcgttcacgccttcccgaataagaaagggtgttcccacttcaataatatcaacgtcatcaaccaccttatccataaataccatcgcttcaggcagggttaactcgtccagggcaagctgtaatttcatgttggtttccttgtgtcgaatgactattcgaggttggcgtgcagcgcaaagcctttggttaagcgatatcccgtcgactgcgccagattcacaatcatggcgtcacccagcaccatgaccgcctcttcaaacaggctgccgccgggcagaatacctttcacattctcgggtccatccggcagtttgtcggaataagccgggatcctgaccgccacccccgccagtttccccagcgtggactcggggaaaatggtcagcaaggccacagtgccacccagttgcttcgctttcgttgccacattcaccagcgaagccgtttcacccgatgcactcgccagtaacagcaggtcgcctttttgcagcgcaggcgtgaccacatcgccgacaacatgcaccttcaggccgatatgcatcaggcgcatcgcaaaagctttcagcatcaacagcgaacgccctgcgccaaaaacaaataccgctttcgcgtcagcaatggcctgctccagacgcgccagcgcagcgccatcaatccgcgacatcgcctgattcaggtcgctacaggcaacgcctgcaacagattgcgtttccatcatgcgtcctcctgacagagcgggaataaatcatcctcatactggagcatccccatgatttcccggacatagttatcgacatgccccagaaaatgaaaacgttccggtgcggcgcggtagcgctggtaaagcggcatatcgaaggtgatgccaagatgcgggttctctttgacggtggcgaatttgatgcgcggaacacgcgggtagtagtgattcttgcgcacgcagagctgcccgttctcctccacgatgtagcaggccataccgtggtaaaactgcaccgtgtcgtagtgaaccgtacagggtttatacgccagattgctgaacaccagcggcccgtcgccgatattgatggagcagtggccataattcggcggcacgataatgctctgcccctccttcacgacggccacgataagatcgtctaccaccagctcctgcggcgcggcggcaaaatccggcgacttttgcaggatatacgccgccgtacccttaattacttcatacacctccggatgggtgttgcgccgcgtgtcgttatagccgtgataatggccactggttttcttacgctccttgccaatcgtccccggcatgatgatggtgatgtcgtactgatactggtcagcagcaagccgttcctgatcctccgcaaagctgagaccgcgataaacatcgtaagccggttcattacgcagcccttcggtgaactccggtaaaaccaccgccatctgcccggcgcttttgcggccaaagccgagatagtttagcggcggtttcagcgccattacgccatcatcatcgagatacagcggcaggccgctgtggtgtagctgtttcatttttgccccctgtatacacgtcatacttcaagttgctgctacgttggctgcgcgccttcatcccggtcacatagttatctatgctcccgggaactcacgcgcttgccgccttgctacaactcgaattatttagtgtatgggttcacaatgtccggaaaccggatgcgctttaatcgcgcggatcgcctctttcagccggtcggatttcatgccaaagacgctctgaatgttgttcccgacctcaacgacgcccgccgcgccaagctgtttcagcagcgctttgtccaccagcgtcttatccgtcacgtcaatgcgcagacgtgacatgcaggcttcgatgctggtcatattccccaatccgccataggccagaatgatgccgctcaccaggtcgttctgttcgctttcctgcgccacagcggtttcttcgacttcacggcccggcgtcagcaaattccagcgacggatggcaaaggtaaacaggacgtagtacaccgcgcccatcaccagcccgaccgggaataccatgtaccagtgaggcgctcgcggcagaacgccaaagaagagatagtcgataagcccgccggagaaagagagcccgatgtgcacgctgaaccactccatcagcaggaacaccagccccgccaggacggcgtgaatgccatacagcacgggtgcaacaaacaggaaggagaactcaatcggctcggtgataccgcagacgatggaagtgatcgcgccagagagcataatgcccttcacacgcgctatgttttccgggctggcgcagcggtagatcgccagcgcaatcgccggaatacagaacatcttgatcggcgtcagcccggccataaaggttccggcggtaatcggcacctgatctttcaactgggcaaagaagataagctggtcgccatgcaccacctgcccggctttgttcacgtactcgccaaactgcagccagaacgtcggccaccagacatggttaagaccaaacgggatcagcagccgctcgacaaaaccgaacaggaaggcggacacgcccggcccctgcaccgtcatggtattcgacaggccattaatcagatgctgaaccggcggccagaccaccgccatcaccagcccgacaaacagcgcggcgaaggaggtcactatcggcacaaatcgcttgccggagaagaactccagccatgaaggaagctagatgcggtaatagcgtttatacagccaggcggcgataatcccgataatgatgccgccaaacacgccggtctgcagcgaagggatgcccagcaccatcgtgtagtcacgcacctgcgccaccgattcgggcgtgatccccagaaactggccgatggtgacgttcataataaaaaacccggcgatcgccgacagcccggcaatgccctgatcgtcactaagtcccaccgccacgccgaccgcaaacagcagcggcaggttggcgaaaatcgcactgcccgcttccgccatcagcttcagcacgtgaaccagcccgtcagtgccgagaaacggcaggctggcgacaatattgggatcctgaaagctaacaccaaaagccagcaaaataccggcggcaggcagcatggcaatggggatcattaacgatcgcccgatgctttgtaacatttgcagaaggttgaatcttttcatctcgatctcctgagcgcgtctttatgacagggattcgcacaacagcaggttctgctccgaacaccttcagtatccgaacccgaaatgattaaaaaaacagcaaccaaagacgaaagttatttccggttttcgcttaaaaccggaaaatttatgagggcaatcacgccagataccgtcagaaagggataaaagaggaaatcgcgttcggcgggaggccatcatatgagtatcttcgaggcgcattttcgcaggctgcacgcccgctacggcgcaggtcagacgcacgaattacagatgcaggagatcgccgccatcttcggctgttcggtgcgtaattgtcgtattgcgctaaaaaagatgcatcaggaaaaatggctcgactggcagccccagcgcgggcgcggcaagcgctcacggctccatctgttaacctcgccggaaaagctgttcagccagaacgtcaataagctgctggagaagcaggattacggcaacgtgctgcggtttatcggcaacgacaagtatctgctggatcgcctgagcctgtggcgctttggggtacaggataaaagcagcgaaacgcgggtacgcatcccctactatcgcaatctggatccgcttaacccactcgtccccctgcggcggaccgaacgccaccttctgcgccagtgcctgagcggactgacgcgctatgacgccgttcagggcaggatcgtccccgatatcgcccactactggacccataacgaggactttacccgctgggagttctggctaaaatccaccgcccgctttgccgatggctgtgagctggatgccagcgccgttcagcgctgcctgctcgccgccagccagagcccgcagttcgcgccgattttcagcccaatcaaaaccattaccgctgacgccccctggcatctggtaattgaaacgcatcatccggtcagacggctcgactgcctgctcgccacccagccgacgatgctgtttgattaccagcacggacacatccgctgtaccggcgctttccacctgcaggagcacagcgacaattttatggttttgcggcgcaatcaacactggcatcaggcgcgccccggactggatgagatcaccattttcacctgggctccggagcatatcagcatgagctttattcccctgctgcggggcgaagaggtgcaggatgaccgcccgctcaacgagcgtagtctggagcagagctgctgctttgtgctgctcgacggtgacggtgcctttgcagatgaggccggaagacggtttatcaattacctgctgcaacctgtcgaactcctcagccagacgcagcttcccgacgaatacgcacgcatcctctctgtggctcagggtatgctgccgcagtggaatcaccgcccggtagattttggcgggatcacagcgccgtttaacctgcgtcagccggttattatcagcacctttcagcaaccggaactggtggagcttgccggagcaattcgccgcctgcttgaacgctggcatattcgcgccgaaatacggatcgacgcatttgaccactttaacaaccagctgcgccctcccgcggatatctggctcagcaactttatgctcgataccctttcggttccggcatttctggaatggctagcttccaccgcgctgtttacacgactgcctgaatcccagcgacaaaacctgaacgcgctgttaccgacgattctaaacagcgacgatgaacaggcgttcgctaccattgccgcctttttccatgagatgacccaccagcgatatgtcattcctttgctgcatcactggatggaatttgcgactgagaagtcatttacctggcgggatttaaatacgctgggatggccggatttcagccaactttggctcgaataatgctacgcccgcaaaagctcgctaaagggcctttaaaggcctttaagggtaagggagataagtgcgccattgtggctgtcaattcgttttgtttagctcttcctgattttcttcttgcctgggagaactggcatattttttcgtttctggatccagaggagctgcgtccggcatcagagtaacattccgcatggtgcgttagatcattctgcatacccaattctgttcgtttaagtattttaggtacggctgagatagcgtggtttgaaccatcagaacaattaaaatctacacccgcaaaggctcgctttagcgagcctttgcgggcggcatttctggataattatccatgaaagcctcaccagagatgtaaaagaatccttcctgccgcggcattctctggacaatattttcccaatcttctgatgctcatgaaaccgcatactgcatcatgataataaagttatttattatcaatgaattatgcggattaaatcagcttgaccatcgcatcaacaatgctatttttacggtaactgccgcagtcctgggactgcacccgagacagccacgaccttagaggactgtgcctggctgctatgtcaggttggtcaagcccttaaccccgcaagccggacaatacggcgggggcgtctctgacgcagtccggtcgttgttgctgctataacctgtgccagtaagaggcaggttggtaccgcctctttagacggagcgtatctctgcgccagtaaacaggttgcctgaaacggcggcgcgtcactttggaggcgaagcaaaacaaagtgacgccgacgcacaccgctgcgccagccgccgtcttatcaggcttatcgttgtattaaccctctgacgccatcatttctgcgtcaaaaagataacaaggaggaatgaacagtaccggaggcggaccacgacgatccgggggcatccctgctgaggcaggcggcctgcacaccgtgcagtaccgtaccccaccatacctcaactctcgccttccggcgcaccggtattgtttagcatggcgcagctttcgctctcccatgcattccccacgcgccggaaaatattgctaccgcatcaggcggaggagtcagcatgtcgcgactggcgcaggatatgaaaaaactggcgcaccgcgcaggtggcagccacaaaaccgtccacgaccgcgaacagatggcgcagcgttttgcccgtcatttgctggcgcagaatattcaggtcaccagcacctgccagctcaaagccagacacatcgcgggatatattcatgaatggctggcgcagggtatttctctgcgaacgctacagaatgagatggcaatggtgcgctctattctggctgaagccggacgcacacaactcagccagtcagaattaatcagcaaccagtcgctcggtatcagtggtgccagctgtgacgggacgcaccgggccattccggatgcactttaccatcaggtactggaccgggttcatcatatcgacgcaggcctcgcagccagcctgcaactggcgcgggtgatggggctgcgcggtcaggaagcagtacagtgctgccagtcgctgaaaacctgggataaacagctggaaaaaggggctgaacgtctgccggtgatcttcggcaccaaaggcgggcgaccacgcatgacacaggtgacggaccgggaagcggttcgtcaggcagtgaaagaggcgcttgggattgccggggagcgtaacgggcatctcattgacaagccggatctgaaatctgcaatggactactggcacaaccatctccgcgataccgggctgacgggggaatactctccccactccctgcgctatgcctgggcgcaggatgcgatccgctattacgaagagcagggtctgagccataaagaggcgctggcggtaacttcaacggatctgggccatggtgatgggcggggaatatatattgagcaggtatacgggtatactgattgaatctcactaatacaagatgtttcattcctttttgtatgtaaaaattcataactactttaaaattttaaatgcacaataaaagtatagatagataatgtgtactgtttccatttcaccgcacttgagtttaaaataccaagattcatctaaaaccaagattgtgtcatgaaaatttcatatttaaaatcatctccgtcaatgattgaagttttaaaaaataactatgaagcatttataattcaaaactataaattcaatcacttaggtttatttcatgacgaagacagtatttatgctgtaatacagaattacaaagaatctaatactacgttagatgaaatacaagaactttacaactacagatttaaaaccgcaggtgttccgggaccaacgtttacagaagaagtaaaagacaactatataaaaatagatcttagaaatacatatgaaaaagtaagtttatttggccaaccatttaacgcattcgaatttaataataacatacgcatagccataccatctaaatttcatccttttcatgttgacatgaagtggtccgacaacagttttacatttaccttcaataaagaacttactcctaatgatattgatgaaatcattttaatatgtgaaagcttaggtttttatggttataaatacaatattaaaacagaccatgaactacctgattataatcatcaaataaagaaaagtaatacacaaggaaatcttacattagttgcgagtcaataccttaggaataatcaacctaaagaaatcttggagaaatatgaagaggatcaagacttttggacagaaaaaagagccaatattttttcagatgtcaatctaaccaaggatgaatgtcttattgattcattcagaaagagtcaaaacagatgctttgtcgatgccagtgtatttccacgaaataacataagagaatatatatcactgtatgacactgtaatcattgcaattccattagcagattcacccaatagtcagagtttttatgacatttttaaaataagcaagattgagctgttagagttagttcgacgtggacgtataaaattcgtcgcattccaaaatctccagcggtatgattcaaattttttggcggatgttctgtctgttgatccagaatgtgtattattttcaagaagattagccgccgcgacattattagcaattagagaaaaaacaggattatttggattcgcatttgatagcagcactcaatataacttattgaaagaatgctacaattcaaaagtcgatgcacttaaaatattagcagagtcgttatcggaaaatatagcattttttgagtatggcataaatcaaagaggtgcattgggtattagtcaattttgtggggcaagctttgcagcccaaatatataaatcacgcggtcgcgattatggtattgagctaatgacaagcgcaatgtcacttgagttctcactagggctaggggcacatcactttccctttgagcacacaggttattctgaggtaaatgcctgtaaaatccttaatggcatatataatggagttcagcaatcacaaaatgaacttcgagaaatggagatacagactttactatcaaatattttcactattaataacgacatgaatgttctcgagttagatgacatcttaagcaaatacagtcgacgtatgatcccacaaatattacaagagtatgcccatctgacacctgaagaattaagctttaagatatactctctaaataaagatattaaagcaattgaaaagaggaagcaaaacttgtctattttagacttgtcaggttttgccccagtagttgcaggggcagtaatggagtataagggactatcgggagcgggttatattgcgttgctaccatggattttcaaattattaaaagtcaccaccaataattcaaagatattcagcaatgaaatatttagtaatttagaagctttaactttaaatactccaagaaacacaatgttggtacataaaataagacaagacatgcctaaatagtacgttttaattcgatgcattatactatttgcacatcaaccaagcccatacgaatatatgggccataacgatgctttcacaggtatggccatttatttggcaaattttaaatcagatcgtttaatctttttttctagtatagcaactatttctcttaacttttttataagttcaataatcgccctacattgcatccatcacaaataaaatgaattgagaatgagttcattgaaaaaatctcatcaattcataatgtaatttagtgatcttttgaagaataaccctcgatctctataacaacttctaaagtatacccaccattctggcttgcaaaatcctctttggtaatagacacatagcgattatctttctttatcataactgggatcttactaaatagctcattaatattaaagtcatcatcccctaatgcttttgatattaattcttccgcaagcaatgaaatggtattttttgaacaatttgatatgggtgaattatttatattagctcttaacttgagtttcttagcagcatattcatctccatataaataatatgcaacactatcacgaaataaaccatcattaccaatctcaatcatatgactacatgatatccaagtatcaaaactgaaatgataatcattggtgtcaactccttttccaacaagaaaatctttggctaagaatggtgaccacccatatttattatctacttcgggtggattagattcgatttttttccgtaattttacgtcttttaaacttgccttaattccttctttcgtcttaatttcattaatatgtatgtttcttacccagcgattaagagcatcaagatctgttctaaagaagcaaatcgctaatttttttgcataattaaacagagcctcatcgtcaaaatatatttttaatcctaataacttagtttcataagcttgataaaggtaaagcatataaataaatggcataaacgaaaatgataataaaactggcgtcagaagttcagtaagattagcccaagaaaacgttaccgaaggcgacataattgaaacaaaaaatgaatgggcaaaataaaatataacgaaaacgcctagcactacctttatcgtcgctccgattttttctgtttcttttttcgtattagctacgacagccagcaaccctaaaaaaagcataatagggtatattataaactctatagcaaaggaaaaactttgtagttcaagaataaatgtaagtagagcacttaatccaatcgtttctttgatttgtgatttaaaataatacttactgctctttattttatgtgtttcaaagattgttacgaaagcatatgtaattacccataccaaagtggtcttaagattatctgtactccaaacaccaatttcataaaaaagcacaatacaaatagacgtccaaacaaccgcaaatcctaatactgtcaaaatttgtttatggaaaaatgttttgataagttgataaaaagaatctctaatatcctttttacaccaaagcagagcaatgattattaacatccatataacaaaagcatactctctactattaatgtccatttagtcaccattactcagttaaattcatttcaaagttacattttatcaagcctttatcattttaaactgaattacggtaggcgtaccaactttgtataagatagaatacaacaagcttcatgcttcttttttagatagtttgttgttcgtgcctatcgtacactttgcgactgttcgttttgcatctattccaagcatcaatcaatacaataaatttcagcaccataaagataataataaaaatcaacaagatacgaaaaccccttccatatcaacatcatcaccaccctttttgcgccttcccttccccgcaaaaaataaaaatctccaacaaactcaaccatctcccccaccaattacaaggacgccagccactttttagttgtttgaagttcaatgaagtctactaagcccgcacagcacaagctctgcgggcttttttacgtctattgtcgtccagtgagaattgctgagaactacgagttatggcaccctgaatgagacccactaagaagggtccaaaaatcgagggtcccaaatggcaaaaatcgctaagaagctcactgacactgaaatcaaaagcactaagccagccgataaagaaatcaacttgtttgacggtgatggtctgattctacgaatcgctcctttggcgaagggagggaagaaaaattggtatttcagatatgcagtgcctgtgaccaaaaagcgaactaaggtgagcttaggaacctatcctcatcttacacttgccaaggcacgagctttacgtgatgaatacttgtcgttgcttgcaaatggtatagacccactagttcataacacccagaaagccaatgccctaaaagatgcaacggaacatacatttcaagcagtagccaagaagtggcttgatgagaaagtcaaaacgtcaggcatctcccgggaccatgctaacgacatctggcgaagtcttgaacgaaatattttccccggtctgggtaatgtgccaatcaataagatccgtcccaagctcttaaaacagcatcttgatccaattgaacaacgaggagtactggaaactttgcgacggctcatttccaggttgaatgaaatcttccgttgggcggctacagaagagctgacccgcagataatctgggccaacgtttcagtaagcctaaaaagcagaatatgccagccctacccccctctgaactccctcgttttctggcagcactgaacaatgcatctgtccgtttagaaacaagactactgattgaatggcaatataaacagacccgttttagttccaggcattttttgagatcccggtcaaatgattgtgttgccgatattcctccggcgtcatattgttcagtgattcatgagggcgttcacagttatattctgacacccatctttccgtgatttcccgcacttcattcagcgttctgaacagataaaaatcgagtatttctgtacagtatgttcggttaaagcgctcaataaaagcgttctgcgtcggcttacccggctaaataaattccagttttactgcatgttgctctgcccattcagccagtgcaagtgagataaattccggaccattatccatgcgtagcatgaccggatagccgcgatttgccgcgatttgccgcgatcctgtcgagtacacggaccacgcgcaaggctggcagattcagatcgatttcaatcgacaatgcctcacggttaaagtcatcaacgacattgaacgtgcgaaaacgacggccacagaccagggcatcatgcataaaatcgacagaccagctctggttcagcgcttccggcgtggccagtggcgaggggttacgcaccggcagccgttgtttgcccttacggcgaaaatccagcttcagcagacaataaatacggtggatccttttgtgattccacatgtatccctgccgccgcagaacctgaaaaagcttcggaaaaccgtatcgtggataccgttcagctgccgcctgcaatgcggtaataacgggttcgtcacgtgtgttatccggacggtaatgataaaccgttctgctcaggttcaggctccggcaggcctgacggatactgagtccgaatgccgttatcagatgagtgaccagctcacgcttaaaggctggttttaaagctttttttcgataacgtctttcagcgcccggttctcaaggctcaggtcggcaaacatctgtttgaggcgtcggttctcgtcctcaagatcttttatctttttaatatcagaaggttccatgccgccgtatctggacttccagttatagtaggtggcttcagatataccggcctcccggcaggcatctttaacggttcgtccggcttcaaccgatttaattacggcaatgatctgatgctcggtaaaacgggctttacgcatagcgatctcctttgttggcagattgattatgccggaggatctctaaatgtgaatggcacgattatgcgggatacttacaatggggcgtggaaaagactcttaggtaattgttgtctgttgtaggacatagcggcaggttaagcagtgaaattaggaatagttagcttggagttagatgcagacgttcttcagatactatttcagattcagttcgtgcatgtctgcagtaacttctgcaatattaccagcagacagtgagcaaatgtgtgtctaggcatagaatccgcatctccccacgcctgcgggacagtatccagagcggactaagttacttagatatctggctggcaacggaaacggtgagaacaatataaaaatgcatttatcaaatttaaataaaatgattgcttattttcccattactaatgagcgcccaacagggcgcttgtgaatcaggtcagatatggccgatctttactgacatcaaacaagtccaagaaaaatgtatcgcctatccgaatattagaaccaatctttacattagtagagttgttgcagaagaaatcaaagtgatatcttggatgcactttacccctagcatttttaagatcatcgtcaaatctgaagtatccgtgatcaactaaaagcaatgaagaaattgcatcacaataatttattgcctgctgaatatctctatcaaagttatcacataattctacagcaatggcctcgtaagaaaaggagccattaccgcaagtagcaattacatttctgcatcgggaaataaattcagcattaacaggaagagcataagcatcataattaaagcagatattgctttcatactcgattacctgaaaaggtaagttcatagtaaaaaaaccatctgttttttttaccaatatacgcttatgtgtacctgtgcttattaataaatcgaaatcctttgtttctttattccaggactcatgacatgtgtttaatatctctgcggtaacaagcagattttctaggttagaaaatgcatcccttacagcacaaaacttgtcaagatattctgctggcacgttattgaaaaagtaaaggctcatagttttttgttcctttcatattctatttcaatcaagcctttaatgtattccccgtcagcatcatcatcttccgcaattatcctttcgactcgatcagttatttttgctattagtcgaggtgtagacttcttgtctgcgcaataacttttaaccatctgagaaattgaaaccgactcatctagaacaataaaatctttttgactttgtatttcttcatctgaaggaagccttacatccatgtagttgttttcattgagaaagttcagaccttcgagaattgtagggattgccggattttcattatcattatttaaaactaagtgactttctaaaaatgacctcgccatcatagtgtagagtgcatttcgaaaattagctctcttcaccagtttcatggcaaaacaaataacaaatggaaattcaagaccttttgcattatttatattagaaataaaaagtttaccatcttgctttgattttgtttcatgtgagatatttgaatcccacccaagctgttgttttacttttgattttagcgaatgaatgtactcataaatataaccaccggcgtcaagaaaaataacagcaatatctccttgctctaaagatggattgcgttccttaatatcgattataatatcaactattttatctggcccattatctgttccttctaacaaatgaacagcagtacttttatgatttttgggaatatcttcaaaacgcctcaaagggtctcttgataaatggactctatctcctacttttttatatttatacccacaagaatcccattcaggctcttttaaccaacgcagaacaggttcctcgtagagtcccattcctaaggcatgagaaaacatcaaattcttaggatctgtgcggtagcattttttaagaacgatatctgctcgattcacgttatcgctaatcggcatgaaaatattttggaaaacgtcacctgctacatataattttttagaagtaaccatttcacagagatcaatgaagctttgtgggaagtcttgactttcgtcgataaatacgtaatcaagtgcctttttatcagctctcccactattatttatatctgcaatggctttcttacatagggcatcaaaatcgccattaccaaatcccccaaatggaatttcgtaataatggcatatatatctgtacattccagaaaaaggttctttagtcaaaccccaagagttgaagcaaaaaagttttgtaccccattctatctgtttttcgactcgcataaaatcgaaaaactcagggattctggttctcattgtggaagcgagaattttattaaagcaagtaaatgcaattctagaatcagggttttttgaataaatctcttttaatttgtgtaaaagtaattcagttttacctgaaccagctaatccttgtattacactcttttttccaaagccactctggaagacaaactttgtttgatccgtatcaaataaaataattttggattttattgtatctaataaattatttgcttcaaggttaattcttgatgtgtcgttaatactaccaacaataagtgagataattaaatcaatcaccctactttctttagtttcgacttccagttttttgaaatcgatatcattacgagaaagcgattcaaataaaatttgccacgattttttcctgccgatcttatctcgatacttgaatttctccgctaaataagaaacatcttcgagaaaatcttcctgatactcctcaaaaagatcatcgtcatccccaaaatctataaaaaaaggttttataccagaagaaaatactgcaatcgctcggtcataatcatactttacatcctcattagatagaggtctgcaaagaatatatgtttgttttttatgctgctcagcatagctgtttattattacatcaacaccagcactttgagccagagctaatgcatcctgagagtaaaagcagtagttggacattaaacttcctctttagcgggttgtctactcatttcaaattcttagttgtgtgctgtgcgagctaatgactgtctttgttctgaatcatactctttacacagaaaaaaaacactttgcagcttcgttaaggtggctcgcgttccgataaactttagcctgctctgcaatgtcgtatcgtaagttattcgttgggatgagagggtaaacctacctgatcttacccagcaatagtggacacgcgactaagtgagtaaactctcaagtaagaggtgactcacatgacaaaaccagcattaaccaccaaaaagccacgcaagcagcacacgcctgaatttcgtcaggaagccctgaaactggctaagcgcattggtgttgccgctgcagcccgtgagctcagcctgtataaatcacagctccacaactggcgaagcaaacagcaaaatcagctctcttcttctgaacgcgagcaggagatgtccgctgagatcgcccgtctgaaacgtcaactggcagaacgggatgaggaactggccattctccagaaggccgcgacatacttcgcgaagcgcctgaaatgaagtatgtcttcatcgaaaaacatcaggctgagttcaatatcaaagccatgtgccgtgtatttcaggttgcccgtagcggctggtacgtctggcatcagcgtcgtcatcagataaaccggcgtcagcggttccgccttgtctgtgataacgtcgtccgggaagcattcagtgacgcaaaacaacgctatggtgcgccacgcctgacggatgagcttcgtgctcagggttaccagttcaacgtgaaaaccgtggcggccagcctgcgtcggcaggggctgcgggcgaaagcctcgcgccggttccgtccggtcagttaccgcaaacatggtctgccagtctcagagaatctgctgaagcaggacttttacgccagcggcccgaatcagaagtgggtgggtgacatcacgtatcttcgcactggtgaaggctggctttatctggccgtggttatcgatctgtggccgcggtcagtcattggctggtcgatgtcctcgcggatgacagcacagcttgcctgcaatgcgttacagatggcgctgtggcagcgtaaatgtccggaaaatgtcatcgtgcatacagacagaggcggtcagtactgttcaacggattaccagagcttactgaaacgccataatctgcggggaagtatgagcgccagaggttgttgttacgacaatgcctgtgcggaaagcttcttccatacgctgagggtggaatgtatccacggagaggactttgtcagccgggaaataatgcggacagcagtgtttaattatagtgagtgtgattacaatcggtggcgtcgtcacagtgcctgtggcggtctcagtccggaacaatttgaaaaccagaacctcgcttagggttgtgcccatattacgcgggtaggatcaagcttccttcagtcttttggggatcataccgtgcaccttatagggatttcacggtaatatttagtaatgctcaagttcttttatttttagatttcataaagatagaaaccataacattaaaggggggtactaacacgaccaattaacttattatgcaccttttccactgcacccgttttcccccatatagcttcagcattgcatcagcaaagctgtcatccagcgcgtagaattaaccttcaggcaaattgagaacttcagcaaatcgacaaaccagttcgaagtgagttgggttatcaacccacaaatagcattaaattagacactatgtaaaacttggaacccctacagtatcacagaaggcgttggcgtacccattgagccaaatttgagccttcataaaaggcctggtaaattttgggattattgggatcgatagctacggcctcttacatcgcttcaactcgttcggcaagcatgaatgaagagtaatcatcaccagacgacaatagtgtaactgccctctttcctggactgttccggtatcccaggagaaagtactttatcagtgttcatctctcttatgatgcccgtgaacccaaatgcgtcgcggaacctacttttaccttcttctgacaagagcaagagtctggcacgatgaataccttccatgacctccgttcattaggtcccctccggtagccccctaagttttacttttctcacggaattttttattaccgtaggcgttattcagcgtagtccgaagacgtgatcctgctcacccagtcaaacataacttgcatatgattgccattggatgtcctcacaccaacctgacacgcatttacgcctgtcgttttgccagtcaaaacctgtccatacttcatatagattttgataccgactccctgtttatagcacttattgcaaatcgagaaataatctcttcttgatggagtatattgctgaagattaaatccgtcagccggcaccagcgaaagattaaaagcgtcattacctgataattcttcaagaattgccagagactctagtttaacttcaatgcgcttatttcctttaggtttatccgaagccagaatcaaattttccttcggattaaacttcgcaatgtagcctgtgattatccgggcattattactcaccaatcgaacagggatatcattaaaacgtagaaattgaactcgacgagcaagcatagaataatcccgcggccatatttcagcttctcgcccgtaggaaatatcatttacagccatacattccataaatatatattcatctatgctaaatgaaaaagccccgaattcacggggctgaataaaacgaaataaattaacgtaacagagacagcacgttctgcgggacctggttagcctgcgccagaacggaagtaccggcctgctgcagaatctgcgcgcgagacatgttggaaacttcggtcgcgtagtcggaatcttcgatacggctacgcgcttcagacagattgtttacggtattgcccaggttggtgatagcagagttgaaacggttttgtaccgcacccagatcagagcgcagcgcatccacctgcgccagcgcggcatcaattttctgcagcgggttttcggtggttttagcggctgcttccgccagctctggttgtgctttgaaatcatgaccagcggctttgctggcattgtaggttttaccgtcgatagtaacgacttcggttttaccgtctacgccacccagttggttagccgctgttttggtagtgccgtcagcagcagtataacttgtggttttagctttaattgctcctgtcgcttcatcgtaatctgcggcgtaatacttatcgccagctttaagcgcataaccgccttcaattgtcttaccatttttatcggtataagacattttgaccaactcagcgccattagcatcggtagcgtcaacgccgccagcaattaaggcatttttagcatctgctgaaacaactgccggtgtatcttttaactcctgtacttctgttttagttgtcgcaccagcaggcattgtggttttagttgcgccagccgcaagggttactgtaccgtcagtagcaacgttaacttcataatcgccatttttggcggcatcagcaccagtaaagccaccaatagtaacaaagtacttgttattatctgcgtcaaatttaaccgcaccaccggttacagaagccgtaccattcgtaccacccgtagccgctttaatagctgcatcatcaagacccgatacatccagtgtagtaccattattggcataagctttcgttgttactgctgtatctttcacatcatacgctttctgcacgttcagtgagtccagacccagggtctgagagttgatctgcttcagatcgatatcgatagtttcaccgtcgttggcgccaacctggatggtcagggtgttgtcctgcgccaggactttcacgccgttgaactgagtctggccggatacacggtcgatttcgttcaggcgctgggtgatttcagcctggatggagtcgaggtcagactgggagttggtgctgttagcagactgaaccgccagttcacgcacacgctgcaggttgttgttgatttcgttcagcgcgccttcagtggtctgcgcaatggagataccgtcgttagcgttacgggaagcctgagtcagacctttgatgttcgcggtgaaacggttagcaatcgcctgacctgccgcatcgtctttcgcgctgttgatacgcagaccagaagacagacgctcgatagcggtgcccagtgcggactgggatttgttcaggttattctgggtcagcagcgacagactgttagtgttgattacttgtgccataaaattttccttttggaaggtttttgataaagcaatcctccatgagaaaagcgactaaaattcttccttatctgatgtaaaggagaaaatcatggctactattgggtatattcgggtgtcaacaattgaccaaaatatcgatttacagcgtaatgcgcttactagtgcaaattgtgaccgcatttttgaggaccgtatcagtggcaagattgcaaaccgccccggcctgaaacgagcgttaaagtatgtaaataaaggcgatactcttgtcgtctggaaattagacagactgggccgcagcgtgaaaaacctggtggcgttaatatcagaattacatgaacgtggagctcacttccattctttaaccgatagtattgataccagtagcgcgatggggcgattcttttttcatgtaatgtcagcactggccgagatggagcgagaattaattgtcgagcgaacccttgccggactggctgccgccagagcgcaaggacgactgggagggcgccctcgggcgatcaacaaacatgaacaggaacagattagtcggctattagagaaaggccatcctcggcagcaactagctattatttttggtattggcgtatctaccttatacagatattttccggcaagccgcataaaaaaacgaatgaattaaaataaaaattacaacaggatggatataacatttttgtaatacaggcgtgtggcataaataaaccgaaagggtatacaaaaaagacagcatctaattaaaaagagaaaaaattcaacgtattaacatatatagtgtaacgcgctcacgataaggcctatgttacatccagctatagacgacatcgctcaaaacactaccagacacagtattcacctggaaaggctttttaatcaaaatgttagatgtaagcaattacggacagaaaaaatagtaaagtttatgcctcaagtgtcgataacctggatgacacaggtaagcctggcataacattggttatcaaaaaccttggttttcaagaaccaataaatcgtgtggctgatgcgctataaaaatcgcagagcggtgacgatattccgcataaggagctgttcgttcgcaacattcgaacggtgacgttaaagccggtttcattggctaatgaagacgaaggggacaaaattcctacagagttgataccacagagatagtccaggctcgcaggtgatacgggatttaacgccggaaagtctgcacagaacacgatctgccgccggacaccattaaattgccccgcaacgtgttatcaatactactccctacgtttcccgttaccttgctgtcggtacgtttacctcattgtctgaaaggttatttgcgaagttatcattaataatccacgggcgtctggtatgcgaatccagttccccaatcctggcgctttgcctgtgcgaccatacgcgcgtaaataagcctgaaaccaaacttcaccgcttaacgctctcatctttcccgatttttacgcaaaaaatcatcacatgatcaagtgtcatattagttattgcattttacaaatgatattggtaattattatcattctcattaacgacttgttcgatttatgacgtggagagagaggatttctcatgcgtattctgtttgtcggtccaccactgtatggactgctataccctgtgctgtctctggcgcaagcgtttcgtgttaatggccatgaagtactgattgcaagcggtggcaaatttgcacagaaagcagccgaagctgggttggtggtatttgacgctgcgcctggtttcgattcggaagcgggttatcgccgtcaggaggcattacgaaaagaaaataacattggaacaaaaatggggaacttctcattcttcagcgaagagatgactgacccgctggtcgcgttcgccgggcagtggcgaccagatctcatcgtctaccctccccttggggtcgttggaccactgattgccgctaagtatgacattccggtagtgatgcaaaccgtcggcttcggtcatacgccctggcacatcaaaggcgtgacgaaatcactttctaacgcctaccgccgccatggggtcagcgcgccaccaagagatctggcgtggatagacgtcacaccgcccagcatgagcatactgcaaaatgacggagagccggttatctccatgcaatacgtcccgtataacggcggcgccgtctgggaagaatggtgggaacgtacacctgatcgcaagcgtcttctggtcagcctcggcaccgtcaaaccgatggtggatggcctggatctgatttcctgggtaatggattctgccggcgaagtagatgccgaaatcatcctgcatcttccggcaaacgcccgctcggatttacgttcactgccgccgaatgtccgtctggtcgactggcttccgatgggcgttttccttaacggcgccgacggttttatccaccatggcggcgcaggcaacaccctgacggcgctgcatgccggcattccgcagatagtctttggccagggtgccgacagacccgtcaatgcccgcgccgtggtcgagcgcggatgcggcattattcccggtaagagcgggcttacgagcagcatgattaataccttcctcggtaatcgcgcgcttcgcgaggcgtcgcaggaggtcgcggcggaaatggcggcccagccttgcccgaccgaggtggcaaaaaaactgatcgccatgctgcaacacggctaaccgcggcagcgcaatgacaatatggcggctgaacccagcgtgtgtcgccatatctcatctttcaccgataaggaggcttaatgcccgcgactcattcccccatgcccgctcgtgcctggatagttcgccttgcccgcgtgtgttgggaacgtaaaacactgagcatcattgtcatcgtagcatcagtatcgaccattttactggctgcgctgacgccgctaataacgcgtcaggccgtcaatgacgcgatagcaggcgatacgacccacctgccgttacttgcctgcggcctgctgttaattgccctttttgattttatcgggaattacgtgcgccgcggctatgccggagaactctcgctgtgggttcagcatacgttacgtagccgtgcgttcgacagtattcaaaaactggacggcgcaggccaggacgccttgcgtaccgggcaggtcatttcgcgtaccaacagcgatcttcaacaggtacacaccttgctacaaatgtgcccggtgccgctggcggtactcacttactatgtggccggtatcgcggtgatgctatggatgtcgccatccatgacgcttatcgtgatttgcgtactggccgcccttgccattaccgccctgcgcgcccgtcgccgtgttttcgcgcaaacggggcttgcctcagaccggctggcgcacatgacggaacatatgcgcgaagtattggaacagatctcagtggtgaagtcctgcgtggcggagttgcgcgaaacgcgttggctcgatggtcagtcgcggcagatggtgcgggtacgcatcggcgccgctatctcgcaggcgatgccgggcgcaaccatgctggcgctaccggtgatagggcaaatcgtcctgctgtgctatggcggctggtcggtaatgaatgggcgcatcgatctgggaaccttcgttgcgttcgcgagttttctcgctatgctgaccggccctacccgcgtactggcatcgtttttggttatcgcacagcgcacacaggcgtcggtggagcgcgtcttcgcgcttatcgacacgcgttctcgcatggaagacggtactgagtcggttgaaggtcagattatcgggctggacgtggagaagatgagtttccactacgacaacggtaaccgtatcctcaatgagatctcgttttccattcacgccggtgaaaccgtggcagtggttggcgcctccggctccggaaaatcaacattgctgatgttgctggcgcgcttttacgatcccacctccggcggggtgtggctcaacaccactgcgggtcaacagaatattcgcgacctgaaactgacggcgcttcgtcgtcgcgttggcgtagtttttgaagacgcgtttctgtttgccggtacggtggcggaaaacatcgcctatgggcacccgcaagcgactcaggacgacattcgacgcgccgccgatgccgcaggcgccagcgggttcatcaatgcgctaccgcaggggttcaacacccgactggccgaacgcggaagcaacctctccggcggccaacgccagcgtattgcgctagcccgggcactgattaccgcgccggaactgctgattctcgatgacaccacctcggcggtcgatgccggtactgaagcggaaattaacacggctcttggtcgttatgccgataatgagcatatgctgctggtgattgcacgccgccgttcaacactgcagttagccgatcggatcgtcgtgctggataaaggccgcgtcgtggatatcggtacccaggcggagctggatgcaaggtgtccgacgtttcgctcgctgatgagcggcgagggggattttctcgcccttgccccggcagaacaacgtacgctatggccaacaacgcaggcggtaaaatccgacgacgcgcatgagcgccagacacccgccggaaaaggttttgtcgaccggatgacgcgcgttccagaacgcgccgtacagatggcgctggcaggccacgggcgtcaagtctcatcgctgctgacgccagtagcctggatgttcgtcatcgccgccctgcttatcgcgcttgattccgccgcaggcgttggcgtgctggtgcttttgcagcgcggtattgactcaggcgttgccgcaggggatatgtcgactattggcatatgcgccctgctcgcgctgtgcctggtggcgatcggttggtgctgctatgcgctgcaaacgatcttcgccgcccgcgcggcagagtcggtacagcatacggtacgcttacgcagcttcagccacctgctacgcctgagtcttccctggcacgagaagcacatcgactcgcgtcttactcgcatgaccgtcgacgttgattcactcgcccgatttctgcaaaacggtcttgccagcgcggccaccagcatcgtgacgatggtcgctatcgccgcggcaatgttctggcttgaccccattcttgcgttaacggcattaagcgccgtgcctgtagtgatgctggcgacgtggatttaccgccgtttgagctcgcctgcctacgcccaggcacggctggaaattggtaaggtgaacagtacgcttcaggaaaaggtctccggtatgcgggtagttcagtcacacggccaacaacagcaggaagccgccaggctacgggcgttatcagacaacttccgcgccacccgcgtgcgggcgcaaaaataccttgccgtttattttccgttcctgaccttctgcaccgaggctgcctatgccgccgtgcttttaatcggggcgagccgggtcgccggaggcgaaatgacgcccgggatactggcggcgttcttcctgctactgggacaattttatggcccggtacagcagttgtcaggcattgttgattcctggcagcaggcgaccgccagcggcaaacatatcaatgcgctattggcgactgaggaaacggagaatattgaaccgtcctccataacacctggcactggcgcgctacgtctggaggcattgacattcctctatcccgaaaaaacgcaacctgtgcttgataatctctcgctcattattccgccaggaacggtagtcgcggtggtcggacgtagcggcgctggcaaatcgacgctgatcaagctgctggccgggctctactctcccggtagcggacaaatccgtgtcggtgagcgcttaattgatgccgcgtcgcttagtgattatcgtcgccagacggggctggtcactcaggatgtcgcattatttagcggcgatattgccgaaaatatccgctatccgcggccagacagcagcgacacggaggtggagagcgcggcgcgacgggcgggactctttgaaactgtgcaacatctgccgctggggtttcgtactccggtcaataacggcggcacggatctgtccgcgggccagcgtcagttgattgccctcgcccgcgcccacctggcgcaggcgcatattctgctgctcgacgaggcgacagcgcgtatcgaccgtagcgccgaggagcgcttaatgacctcgctgaccagggtgacgcataccgagaaacgcatcgcgcttatcgtcgcgcaccggctgaccaccgctcgccgctgcgatgtgattgtcgtaatcgataaaggatgtatcgctgaatatggcagccatgatcagttgatagcggctcatggcctgtatgctcgtctgtggcggaacagcatcggccagacacgcgatacgcaaggagaggtcataggatagtttttatcgccacgatttacgcaaaagaaagcccgcaagcggctgttcatgtaacagccgctttagctattgatactgaccgaaatataaacgagatggaatacaaagaatgagactgagcccgcccgtcgctcctgtcgctatacagaccgctacgcgccttcgccgtcaactcgccgccggaagccaggttgacgcttctcacttctggcgagaagcaaactcgctcgcactgccgctggtgacagccattaacggcgcagacgatgaacgggaagtcaccttcctgtggcgtgccgcctctcctctgcggggggtttatgttcgcctgaaccgtgtcaccgataaagataacgtggcgaaaggtatgatgacgcaactgcccacaacggatatctggcatctgacgcttcgcttaccggcgtcctactgcggttcctatacgatggtcgaaataccaccggaaaccccgggcgagacggtgttgcagcttggaagccgtttcgcctcccttgtcgggaaggcggatccgctgaacagcgcgccgggaataaatgttcggggcaatgcgcaggaatccgttctggcgctggatcatgccccggcacaggaggagtggtcaggctgtcgcgcttacgccgggcagcttttcacctcagagcatcggctcgccggacaacgtcgccgtgtgcggctgtatcttcctgacgttcctgtcgtacaaccgctgggcttgctggtactcacggatggcgagatctggttcgaccatcttggggtaagcgccgccattgacgccgccatccgcagcggacgcatcgcgccggtggccgtactcggcattgataacatcaacgcgcgtgaacgcgtcgcaatactcggcggtcgccgcgagctggtgctcgacattgccgaacgcctgctgccaacccttcgcgccaaatacccggaacggcggtgggcggaccgtacacaaacggtgctggcagggcaaagccttggcggcgtgaccgcgctgatggcggcccgccacgcgccagagagcttcggcctggtgctgagccactccccctcaatgtggtggacgccggacaaccgcaaccgcccgaaccatttcagcgcagaagagcgctcatgggtcagcgaacatgtgttatccgcgccctcgccagccgtacgtacgcatctgtgcgtgggatcgctggaaggttcgacggtcccgcaggtcaaacagttgcatgaaaaattgcgcgccgccggcgtcgaaagccattacagcgtgtacaccggcggtcacgattatgcctggtggcgcggcgcgctgattgacggattacgtctactgccccgataaaacttcacctgccaaaaaggaataacatccgatgtatggtcgccagtaccacaacaagcgctatcgcatggcgctatttttagtgagtttttgttttagcgcgctgagttatgcgcagccggatatgcagccattagggccgaatatcgctgataaaggttcgggatattaccatttcagggtcaatgactttcaatctgccgatggcgcaagacattaccgggtatggaccgctatccccaataaagccgccccgccgtcgggttatcctgtcttatatatgctggacggcaacgcagtgatggacagactgccggagacgctgctcaaacagctggcagaccactcgccgccggtgattgtagcgattggctatcagactaacctgccgtttgatcttaacggcagagcttatgactatacgccggcgccgggaatcgatcgcgatgacagtgaaaataacccgcgttttcatcgtaaaaccggcggcgggccagcgttccgccagctactggagagacatatcgcgccgcaggtggaacaaggaataaccatcaactccgaacggcgcggggtatggggacattcttatggcggcctgttcgttttagactcctggctgtcgtcatccttctttcatatctattacagcgccagcccgtcactcagcagggataactttgtcctgttgaatcgccttacgacagtgaagccgtcgctgttctgccataaaaaactcatcataatggaaggttcagcgtcgaatggggatagcaggcaacgccagatggccgagctcctacaaaaagttcaggagaccgtgagaacgcttgagaacaacggcgttaacgcggccctgcagcattacccgggcctgggccacgggcccatgtttaacgcctcttttcgcagtgcattgctggatatcagtcgcgaaccggcaagccaaaaaccacgctgccattaacccgccgccagaatatgcccgccagcggcgggcataatccatcaaaacgaggccgtcacaccggcataataagcccgccccggttcgttataggtatttgccccttcggcggagcgatagatctgtttatcgaagatattgctgataccgacattaagacgcaggttcttattgatatcgtagttaacgttagcgccgaccagtgagtaagcccccagcgctttcccggacaatcctttggtctcttcactacgcgactccgcatgtgttcgcggtttttgcttgccgtataacgtccagttgacgttagcggagagcgcgctggtgatagtccagtcgaggaaggtattcaccgtatatttcgggattatcgataagggattgccggtatctttttgctcagaagcaatcatataagtcgcattggtattccagttcagacggtccggcatcagcggaacagccatgctggcttcaataccttcaatcagcgctttaccgccgttctgccactgcaatacataagcgccagatgcgcttctgccaataatctgatcacctgcgacaatcttattctgataatcgttacggaaatacgttacgcttgcgtgataatcgtctacggtaaattccagcccaatctctttattgatactaatttcaggatcgaggttcttattaccaaccaggtaacagccgcccgacgtaatatcttttggacaaccgttgcctttcgaatagagtaaatacccctcactggtttgatacaagttcggagccttaaaggcacgggcaataccggctttcaccttgacgtattcacctaactcctgggaaaggttaagactgggactaaaattactcccggattcgctcaaatagtcaaaacgcagacccggaataatattggtaccggccataggttcgatattatcttcaacgtacagcgcactgatttccgatttatttttgctgctacggttagccgccgaaccgggaatcccggcgatattgctatccttaaccgtcagactggtagaggaaggatcgttcagctcatcgcggttccactccgcgccgacggtgagcgtttgctcaaatagccatatcaccgggacattcacctcgccgctggtgcgatacgaggtcaggcggttagtggtgaacgtctggtcgttggtaatacgcccctcgccgccgccggagagcccctcattcatgcgggtgttatcggttttttcatagtagaaccccaggcggctttgcccccagtcccagatgccgttatgagttagaccgtaattctgccggtacaggcgattggtctcccgcccggactgcgccagacttttggtaaccgcgtttgaagtactgttttgcgtatcgccagcataaatattcccctgccgactatatcccgcttcaaaatcaaggatttgctgcggggtcattttccatgagaagacgctattaatatctttattggtgaccccctcccgtccggcggcatttttggtaccggcggaggagttaatatcccagctatcggcatcggttctgttgagattaccgtacaggcgcatcgtcaacgtatcaccagccaacggaccgctaaggctaaagttaccccgccgggtgtcaccttctttgctgctttccggctggttggtatagagcgacagcgagccgtgccagtcgttagtcggacgtttggtgatgatattcaccaccccgccagcggcaccggagccatagcgcgcggcggcgggcccacggatcacttcaatacgttctaccatctccggcggtacccagttcgtatcgccacgggtgtcgcgttctccgcgccagctatagcgaaccgaatttcgcgacgtcaccggcacgccgtcaatcagcactaaggtattttccggccccataccacgaatatcaatttgtcggttatttccgcgcgtccccgaggcgctattgccggtaagattaaccccaggcatcttacgaataatatcggcaagatcgttaacgggaggattcttttgaatatcgtcacgagtaataatcgaaacgcccggctgttgctttaatacttgctcggcggtggattcaaccaccatcgtttcgccgttgtcgtcagtagattctgctgctgataatggactattaacccctgtagaaaccacggttattaaccagatgaacttcttaactctcatacccattccctaaataatgtctaaagtagcgctgttgccctcaagctcacatccttgccaggttacgtctatatagtaattattatcatatgctaatgataataattatcattcaattaaggaaaaggcaatctttcgaccacaaaaatctggtaataaaaaaacggaaacgggattttgcaatatgactctctgtccgggctccgctttgccagtaaatccgggaaggggggcagaatgcgcctactgaacggaggttttacaaaacagaaatagataaaataaaactatttttcagatcgttaatcacaagaaacacccaggtaagatggtatagcacggttcagggttcaccgccgcttccctgccgacggcgaaccattcttacagtttgccagcgactttccgtctgggtaatggcgggatcggatacgattgtagccattcgatatttgatgatgaaagtgatgttggcaccaacatacaaagcgcctggtaatatttatcaggcgctttgcagacagaaaaccatcaaacatcagtttctcgttctccaggaactactggaaaatatggcaacccacagttattgggttttactgtcgggtcttgccagggattttgtgttacccccaggtcttttaaaagaccgcgtaacagcactaaatccctgggtgtcattttttgctttggttcaccctctttaggtggacgaatatcctcctgactagtacatgtaacacaataaccttttaactctatccacttaggcttagggggggccttaggatcgggaggcgtcgagctgacaacgcacgaacaggcacttatacatccaggcatagcgttttccttttcaaacaattcgctttagttggaagttctacttgagaaaataggaatggttattcagatatttttaccgtcgcatactcctgtaataataaaagatactgtaaataatttactctcagctactattcagtagcagattgttattcttacattgcttttatttcagatttacgtcaaaaagggctaaatattttcactataaaattcgttaaagagtgtttgtgtgcttgtagacattgtggcgtcttcagtacgcaaatcggttagtgtacaatctttaaaacaggtattgtttaaattagcctcagccaaatcagccccgtccaggttcgtagaaatgaaactcgcctttcgcaggtttgcccgggttaagacagcgccttccataattgcagccattatagtagcaccctgtaatgtcgcaccgctcatatcagcacgtataagggttgcgcctgaaagattagtgtgatccatatttgcaccggagcaattacattctatcatgctacagcctaacagactcgcgtgttgtaaattggcgccagtaagattagcgtgatcgagggtagcgccacacataatgctatcttccagacaggcgttcttgaaattactgtcgcctagtgatgttcccgatagatttgcgcccttaaaatttgcaccttcacaatccgccataaacagcactgccccctctaaatttgcgccgcttaagtctgcgtcacataaattttctgacgtcagatttgctccggtaaggacagcgcctttaagattcatgcctccctgggcagttaatattacagaatcctgagggagagaaaattcgcatctgaatagtaaagctcggcatattttttcaaaagaggcaagcggaatttctcttgtctcagaatggtcgcctttactgactcgtacaataacttgtccagcttcgttattctcaccaggaagattaaattcgacacgacacccatccatatcatccaggatgatgttttctggcaacggagcacctctgtcaggcattgtacttttcaatgtctcagccatagtctctatcaattcctgatattgtgtttcatttctccgacgtatcccaccacaggtaaaaaagttaatgatatattccagaatggttttgggcgaggtagcttgccgcatagcagcagaagtccccgcgccaaaagcagatttagccataccagccagactatcgagtgaacgctccatatattttctcccagagacagcaacacagtgcatgataaaatttatcatatagatttgcatttagagataaggtgaataccccctttacgtctggttacataataacgtatcacgacgcgttgctgtctggcttacacaatagcagccaaataaatatattggcttatactcgtcatacttcaagttgcatgtgctgcggccgcgttccctcaccccagtcacttactttagtaagctcctggggattcgctcgcttgccgccttcctgcaactcgaattatttagagtatataacatcatttaaaataataaacacggcattcgttttaatactacgttctggactcatcccactcattagcagaaaacctattaaaaagcgtgttcaggcattttattaccgccattgataaactgtttaacaacatcgtctgtacagaccttcttcgttgcctttacgtttaactcaatcaggctaccgtctcggttataagtctatcgagtagtagagccgtagtatgacgatgcagcaaagtgatatggaaagatataatccattattaatgttaaaagaagtcatggcgcagacgccttatcgccataaacgctggggagagcgtaagtttcgctataaatttttattacgttgccttattaaccccgtaacgacaattaaatacttcaatgaattatgccatctgtctcagcccagaacgctgattattcatcgtccactgttgccggcaaaaatccagcggccctatttgtataccgggcttagcatacgttgccgggcaaaagctattctggaacactaccagttcgttcagtcctttccggaaagtaaaattaaaaagatcctcctgtccgaggaacaaatcttactcgctcacctggaaggaaaaaacggtgctctggtagatatctactgcggtccctgtggctatgacagagaaggtgaactgacattaacgctgtgcttcaatgatacgccgttggcacgtttatcattttcctttatccgccatgaagggaagcaaatagcgctggttgccgggttacaagggcccagtaaacatatcggcccacaagtcatacgtaacgccaccaaagattgttacggtctctttcctaaacggatgctgtatgaagcatttgcgacattgatgcaggcctgtaatgtcgacgagatttatgcggtcagtgaaaacaaccatgtttatcgtcaactccggtacttattccagaagaaaaaaacttttgtggccagctatagtgaattctgggagtcgctaaacggcgttaagaaaggtgccttatatcatctgccatcacaggtgatgcgtaaagcgcctgaaagtatccccagcaaaaaacgcgcagagtatcggaaacgctatcatattctggatacaataatacaagaggtcaacagcctctcccggtagaactatttcatacgcggatgtgcagatcctgctaccgttcagcggatcttttgaaatctgtatcgctactggatggttaaatacagaatggcttgcgagtgaatagcgcggcattaaaccgtcgctttcactcatgttatgatcaacatcttaatcttattcccttcaccataacgtcatcgattagcatgttaaccattaaatacaagctaaacatttgtcacatttttatttggttaagcaaaaaaataatacaaaatagcattttcagtaagctaagtcaggagttttggtgaaaatacaagaagttaagcgtatattaacccgctggcaaccgtcttccttttccctataccgggaggtgtttacgcaatacggcggtagtatcaatatgcacccagatattgtggattatttcatgaagcgctataactggcattttaaattcttccactataaagaagatgataagattaaaggcgcctactttatctgtaatgatcagaatattggtatcctgacgcgcagaaccttcccgctatcttcagatgagatacttattccgatggcgccagatttacgctgcttcttgcccgatcgtactaaccgactttcggcgttgcatcagccacaaatacgcaatgccatatggaaactcgccagaaagaaacaaaattgtctggtcaaagaaacgttctcttctaagtttgaaaaaacacgccgtaatgaatatcagcggtttcttaaaaaaggcggaagtgtaaaaagcgttgctgattgttcttctgatgaactgactcatatttttatcgagttatttcggtctcgtttcggcaatacttcatcctgctatcccgctgataaccttgccaacttttttagtcaactgcatcaccttctgtttgggcatattctttatattgaagggataccctgtgcatttgatattgtactgaaatctgaaagccagatgaacatctactttgacgtatctaatggtgcaattaaaaatgagtgcaggccactcagtcccggcagcatactaatgtggctaaatattagccgtgccagacattactgccaggaaagacaaaaaaaattgcttttttccatcggcatactaaagcctgaatgggaatataagcgcatgtggtcgaccccctattttaccggaaaatcgatttgctaaaaagaaagcctggacgtaaatatgttttttacgtccagatttttcataaatcctgatgaactgataaaaaacgaaaatttaatcagaatttaaaaaataagttaaccaccatataatcataatgacaattactcgaaattcacttacactatactcggttttatggaattgattaacacggtatgttacagataacgtgctaaaaagcgtgcagcggttatacattttcatatgtgtgtgtcattaacctggcgtcaggaacagatgatgatgacaactacccttttatctcttctggcctggcataccgtcagtagattaaaggagtagccttgctttatggcattacaaaaatgcgggtggggtctatgctcaatgtatacgttatttgtaacaacgctcttgtgcataaacaatacgttattgccaacagcactgaacgggtacagtggttcttgctgacaacaggcttaaagatcgccttaacacgggatacctgataactggattatattatgacacatgcagactggctgattcttgggtatacaactgttattattatttttggtattgtatgttatatcggattgcttaaattgataacgaaaggcaagcatgaaaaataacgcacttaccgggaagaatatactctcaggagataaaatgcttcggcaatgatatgacaccactgccgaaatgctatttttaaagaaatcaatcaggtattgagggtgattttatcatagccgcgccagcgataattcaacaccgagagcagccagaatagcacaaaagcacccactacccagaagcccacattccccatatgatcgttaagcgtgctgacggtctgccaaaatgttccgcttaactgtaacgcatcatcaatcaaccccagcgcctcaagcccgccaatcgccagcgcgacaatgacggatgcggcggtaatggtcatattataataaagcttacgtaatggatgcgagaaagcccaaccgtaagcgccgaccatgacaaagttatccagggaatctaccagcgccatcccggcggtaaacagcacaggaaaaatcatcattgaccagagagatagcccctggttagctgctgaagcggaaatgcccagcaacccaacctcggttgcggtatcaaatcccagaccaaacagaaaaccgacaaaatacatatgccaactggaagtgaccaaacgaaacgtacgctgaaatatacgcgtcatcagcccgccaggtatcgcctcgtcatgcgccctcactgactcgccgcgggtaaccgagcgaaattgccgccagacgttgaacaaaataaacaggttaagcagggccatcgccagcagaaaaaaagcggaaacagccgtaccaatcaacgaaccatattgatgcaaaacatcaatacgatcgcgaaatgccatcgacgtcacaacaatcgccagacatgccagaacgacaatggtcgaatgacccaatgaaaaaaacgcccccacgcctaaaggcgttttaccctgctgcatcagtttacgggtgacggtatcgatggctgcgatatgatcggcatcaaccgcatgacgcagcccaaagctatacgccagtatggctgcgcttagcatgacggcatggtgatgaaaaacacagaacgcccaaatccaggccaggatgttaaccccgacaagaaagacggttaatgctattccccgtcgtttagtatgattattcatgcccctgcacccactatatttttaattaacgctacggtttgtagggggaatgtatgatcatttgattaaaacgtcacacctcaagatgcgactttttgtaaacgtgctttaccgctgacacatttgtccgcattactgcggaacaaggcttaaaaagcgtatccgaacgtataaccctcccaacgcttcgctacgggaaaaatggggatgagtacggtgcaggcgtgcgatatcattgaccaaagccagaccaatgcccgccccggccacatttcctacgttatcgagccggtggaacggctgtagcgccagatggatgtgttcatcatcgatgccgggaccgctatcttcgacaaccagcgtcacggcatcgccatcccgttcaagccgcgcggtgacgatgccttgctcaggcgtgtatttcagcgcattatccagcaagtttccgcatagctcgctaagcagtacctcatccccctcgatccacatcgcttcctgttcgccttcgtagcccaggtcgatatgtttactgcgcgcctgcgccagacgggtaaaacagccgctctgtacgatatcgtacagattcaccggggaaaaacgccgctcgccctgctctttatgctttaccgcagaaagttgcaacaatctttccgtgagctgaatggtgctatccagcgttacgctcatcgcctgcagactttcgtaccagtgatgagggtgctggctggctaacgccaccgccgcctgcgtttttaacaccgccagcggcgtttttaactggtgagaagcatcggcgctaaagcgttcctgccgggagaggatgccgcggagcctgtcaatgtagcgattaaacgccacgattaacaagcgtgtttccgaccacggcagcagttccggcagcggcgttaacagacccggttcgcggcgtaccattaatgacgaaagttgacgcatagggcgcaggatccggcgtaataaccagccaaccagcaccagggtcagcaacaccagcagaccctgtgagatccaggaagagaacagcagttggcccgccagataacgacgggactgcagcgtctctgcgacataaatctccgccatgccgataatgccgccttcgttgaccggctgtagcaaacgcgccacgcggatcgcctcgccgcgatactcggtatgatagaaccacgccagcgccggataaagccgggtacggggcgtagcgggcggcatgacgggcagatcgtcataaccggaaatgacctttccggaagggtcgacgactttgtaatagagtcgatcattcatattaagctcgaagctatccagcaccacccagggcacgttaacttccagatggttattgcgcaccaccagccgttccgataccgttcgcgccgaggagagcaacgtacgatcataagcctgagtggcggcctgtagcgcattgacataactgttaaacgccgacagcccccatagcagaatcagcggcaaccccaggaacagtaagagttgcaggtacaacgattgcggcttaacccacttcatcgccgcgctccagcacataacccaggccgcgcagcgtcgtaattcgtacatcgcttccctgaagttttttacgcagtcgatgaatataaagttcaatgctttcagggcttacctcatcgttcaggctgaacacctgttcaaaaagctgctgacgcgaaactggtcgcgttcgtcggtacatcaatacggttaagagcgcctgctcacgcggcgtcagcgctaacggctgcccctgtaacagaaaatacccttcatcatgaaagatcaattcccccagttgctgaacttcatgaacctgcccagcgctgcgtcggagcaaggcccgtaaacgggcatccagctcttccagttcaaagggtttcggcagatagtcatccgcgccgacgttgagaccttttacgcgatccgccaccgcgcttcgcgccgtgagcagcaaaacgggcaaggtctgaccgcgtttacgcagccgttgcaccacctccagtccatccattcccggcatattgatatccagcaccgccagcgcgtacatttcactgtgcagaagatggtcagccgccaggccgtcaaatacgcagtccacggcaaagccgttttgcaccagcgctttctccagccagtgagccagctcacggttatcttctgccaataagagacgcatatcacatcctgtaaagtttctgccgcattgaaagggaattgaaaggttattgttttaacaatcacgcaaccgaactgctacatgtcggctcacataatcacaaaaatcttcttccgaacctgaaaaatccggacgtccggcgtgaggataaaaaatgaaaaaacaattacttcgtacccttactgcaagcattttattaatgagtacctctgttctggcgcaggaggcgccgtcgcgaacggaatgtatcgcgccagccaaacctggcggcggtttcgacctcacctgtaagctgattcaggtgagtttgctggagactggcgctatcgagaaacccatgcgggtaacgtatatgcccggcggcgtcggcgctgtggcctataacgcgatagtcgcccaacgccctggcgaacccgggactgtggtcgccttttccggcggttcgctgctcaacctgtcgcaggggaaatttggtcgctacggcgtggatgatgtgcgctggctggcaagcgtgggcactgattacggcatgatcgccgtgcgtgcggattctccgtggaaaacgctgaaagatctgatgacggcgatggaaaaagatcccaacagcgtggtcattggcgctggcgcctctattggcagccaggactggatgaagtcggcattgctggcgcaaaaggcgaacgtcgacccgcacaagatgcgctacgttgcctttgagggcggcggcgagccggtgacggcattaatgggcaaccatgttcaggttgtctccggcgatctcagtgaaatggtgccttatctgggcggcgacaaaatccgcgtgcttgccgtcttttcagaaaatcgtctgccgggccagcttgccaatatccctaccgctaaagaacagggctacgacctggtgtggccgattattcgcggcttctacgtcgggcccaaagtcagcgatgccgattaccagtggtgggtggataccttcaagaagctccagcaaaccgacgagtttaaaaagcagcgcgatctgcgcggcctgtttgagttcgacatgaccggccagcagctcgatgactacgtgaaaaaacaggttactgattaccgtgaacaggcgaaagccttcggactcgcgaaataatcgcggaggcaatgatgagcgatcgtatctttgcgggtatctggctgttgctctgtatcgccgggctattcatcgcctggcagatccaaagcgaatacagctatgaacccgtcggcccccgcccttttccgctggggattatcggcctgatggcgctctgcgcgctggcgctgttattgcgccatcccgacacggtgagctggccgcgccgccatgttctgcaaaagctaattaccatgatcatcatcctgttgatgtatgcctggggattcgaatggctgggttttcccatcgccaccgcgcttctcaccatggttatcgggatgctgttcggcgccacgattccggcggcgggtatctccggcgcggtattgggcattctgctgtggtatgcctttgaccggctgcttgatgtcaccttacctctcggcgcctggctgagttaacggagcaacgatggatacctggatatatctttctcagggctttgcggtggcgatgacgccggaaaacctggttatcgcgttgattggctgcttcgtgggcacgatcgtcggtctgctgccgggtctgggaccgatcaacggcgtggcaatcttactgccgctggcctttgcgttgcatctgcctgcggagtcggcgctaattctgctggcgacggtgtacattggctgtgagtatggcggcaggatctcctccatattgctcaacgtccccggcgatgcggcggcgatcatgacggcgctggacggttacccgatggcgcagcaagggaaaggcggcgtagcgctgtcgatttccgcagtcagctcatttttcggttcattaatcgctatcggcggcatcattctgttcgcccctttactggcgcaatggtcgctggcctttgggccggcggaatatttcgccttaatggtttttgccatcgcctgtcttggcagcatgatggcgcaaaacccgcttaaatcatttctggcagcgctgatcggtcttggccttgcgaccgtcggcgtggacgccaacaccggggtttatcgctttacctttgacagcgttcatctttccgacggcgtacagtttatcgtcgtggtgatcggcctgttctcggtatcagaaatacttttaatgctggaacataccagcagcgggcaaacaatggtccgcaaaacgggtcgaatgttgttcaacctgaaagaaggcgcgcagtgtatcggcaccaccctgcgttcttcggtaatcggcttttttgtcggcgtattgcccggcgccggggcgaccattgccagcgccattacctatatgaccgagaaaaaactcagcggcaacagcgatagcttcggcaaaggggatattcgcggcgtcgcggcgccggaggcggcaaacaacgcctctgcctgcggctccttcatcccgatgctgacgctgggcgttcccggttccggcactacggcagtgatgatgggggcgctgacgctgtacaacatcacgccaggcccggcgatgttcaccgaacagccggatatcgtctggggactcatcgctgcgctgctgattgcgaacgtgatgctgctgatcatgaatatcccgttgatcggtctgttcacccgtatgctcaccattccgctgtggttcctggtacccgccatcgctgccgtatcggcggtaggggtgtatgcggtacacagcaccaccttcgatctggtgctgatggtcgcgctcggcgtgttagggtacattttacgtaaaatgcacttccccatgtcaccgctgatcctggggttcgtactgggggaaatgctggagcagaacctgcgtcgcgcactctccatcagtaacggcaatatggcgattttgtggcaaagcggcgttgccaaagccctgctgatcatggcgatcatggtcattgtcgtaccgccagtgttacgtctgctccgtaaacacagccgtaaaccgcaggttgacgccggttaattgactgctgaaatacgttgtacttgtccggcctacgcgctcatgtgtcaggccgggcaaccccgccagcatcactttccccataacgctctcattttacaccccttcttgccgttgtcaggctcgtggcgccgttaacctcaccctttgcattgttaaatatttgttgtttttgatcacaataattaaacaaaagcggttatttcatacgcattcctggaaaatgtcgatatttttaatttatggctacgaaatgagcatcgccatgtctccctgaccatctaccgagaggaatgattctgatgaatgcactgactgccgtaaaagcgaacacagatgatttagcccaacgccatactggtttcacccttgccccttcggcgcagtcgccgcgcctgctggcgttaacgtttacggcggataccacaaaacaatttcttcatcaggttgcgcagtggccggtgcaggcgctggaatacaaatctttcttacgttttaaaatcggcaagatcctcgacgatctgtgcggcaatcagctacaaccgctgttgatcaaaacgctcctcaaccgtgcacaaggcgcgctgttgatcagcgccgaagggatcgatgatgtcgcacaggcagaagagatggtcaaactggcgacggcggtggcgcatcttattggtcgctccaactacgatgcgatgagcggccagtactacgcgcgtttcgtggtcaaaaacgtcgacaactccgacagttatctgcgccagccccaccgcgtaatggaactgcacaatgacggtacctatgttgaggaggtgaccgactacgtgctgatgatgaaaatcgacgaacagaatatggaaggcggtaattcgctgttgctgcaccttgatgactgggaacatctggagtcgttttttacccatccgctggcgcgtcgcgtcatgcgctgggcggcgccgccaagcaaaaatgttagccatgacgtctggcacccggtgtttgatgtcgaccaacaaggccgcccggtcatgcgttatatcgaccagttcgtccagccaaaagactttgaagaaggcgtctggctcagcgagctttcagacgcgctggaaaccagtcaaaacatcctctccgtaccggtaccggtcggcaaattcctgttgattaacaatctgttctggctacatggacgcgatcgttttacgccgcatcctgacttgcgtcgcgaactgatgcgccagcgcggttacttcgcctacgccgccagccattatcaaactcaccaataagcgccacggcgaaggaattacgcggatgtatgattttgtgattatcggcggcggcattatcggcatgtcgaccgccatgcaacttattgatgtctacccggatgcgcgcatcgcgttgctggaaaaagagtccgcgccagcctgccaccagaccgggcataacagcggcgtgatccatgccggggtgtactacacgcccggcagcctcaaagcgcagttttgtctggcaggcaatcaggcgaccaaaaccttttgcgatcaaaacaacatccgctacgacacctgcggcaaaatgttggtcgccacctcggagctggaaatggcgcggatgcgcgcgctatgggagcggacggcggccaacggcttagagcgcgagtggttaagcgcggcggagctgcgtgaacgcgaacccaatatcattggcctgggcgggatttttgtcccttccagcgggattgtcagctatcgcgatgtcgcgacggccatggcgaaccgctttcaggccaaaggcggcgagatcatctaccatgccgaggtcagcgcgctaacagaacatgccgctggcgttgtcattcgcacctcgcaaggtcgggaaatagaaaccgctacgcttatcggctgtgcaggactgatggcggatcggctggtcaaaatgctgggcgtggagcccggttttattatctgccctttccgcggcgagtactttcgtctggccccgcgacacaaccggatcgttaaccatttgatctacccgatccccgatccggcaatgccgtttctcggcgtccatcttacccgcatgatcgacggcagcgttacggtcgggccgaatgcggtgctggcgcttaaacgcgaaggctaccgtaagcgcgacgtttccttcaccgacaccctggagattttccgctccgccggcattcgccgcgtactgcaaaaccatctgctttccggactgggcgagatgaaaaactcgctgtgcaaaagcggctatttgcggcgagtacaaaagtattgccccagcctgaccgtcaacgatctccagccctggccggcaggcgtgcgggcgcaggcggtttcaccggacggcaaactgattgatgattttctgtttgtcacaacgccgcgttccattcacacctgtaacgccccctccccggcggcgacatccgcgatacctatcggcgcgcatatcgtcagcaaagttcaggcgctacgcgcaagccagagcaaccccggacgtacgctgcgtgcggcacgcagcgtggacgcattacacgccgcatttacccgttaacccttcagacaggaagcaattatgcaacttaacgactctaccctgttccgccagcaggcctttatcgatggcgactggcgcgacgcgcgcggcggcgatgtcatccccgtgagcaaccccgccaacgggaaaccgcttggcaatgtgcccaaaatgggggcggaagagacgcgcgacgccatcaacgccgccaatcgcgccctgcccgcctggcgcgcgctcaccgccaaagagcgagccaatatcctgcgtcgctggttcaatctgatgatggaacatcaggacgatttggcgcgtctgatgacgctggaacagggtaaaccgctggcggaagcgaaaggcgaaattagctacgccgcctcgtttattgaatggttcgccgaagaggggaagcgtatctatggcgacacgattccaggccatcaggccgataaacggctgctggtgattaaacagcccatcggcgtcaccgccgcgattaccccgtggaactttccctcggcaatgatcacccgtaaagccggccccgcgctggccgcaggctgcacaatggtactcaaacccgccagccagacgccgttttccgcgctggcgctggcggaactggcccagcgcgccggaattcccgcaggcgtatttaacgtcgttaccggttcggcaggcgatatcggcggcgagctgaccagcaacccgctggtacgcaaactgtcgtttaccggctcgacggagattggccgccagctaatggaacaatgcgccaaagacattaaaaaagtgtcgctggaattgggcggcaatgcgccgtttatcgtctttgacgatgccgatctggataaagccgtcgaaggcgcgctggcttcgaagtttcgcaacgccgggcagacctgtgtctgcgccaatagattgtatgttcaggacggcgtttacgatcgttttgcggaaaaactcaaccaggcggtaaataagctcgcggtcggtgacggcctgcaagccgacgtcgctatcgggccgctgattgatgaaaaagccgtggcgaaagtccaggaacatatcgccgatgcgctggaaaaaggcgcccgcgtcattacgggcggtgaagcgcacaaattgggcggcaacttctttcaaccgaccattctggcggatgttcctgataacgcgaaagtcgccaaagaagagacattcgggccgctcgcgcctctgttccgcttcagcgacgaggcggacgtcatcaggcaggctaacgataccgagttcggcctggcagcctatttttatgcacgcgatttaagccgcgttttccgcgtcggcgaagcgctggaatacggcatcgtcggtattaataccggcattatctccaacgaagtcgcgcctttcggcggcattaaggcctccggattaggccgagaaggttccaaatacggcatcgaagattatttagaaatcaaatatatgtgcatcggcctttaacaggagagtcgctaatgaataccaataacgctttaatgcagcgccgtcataacgccgttcctcgcggcgtggggcagattcacccgattttcgccgagcgggcggaaaattgtcgggtgtgggatgtcgaaggccgtgagtatctcgatttcgcgggcggcattgccgtcctgaacaccggtcatttacatccgggcattgtttcagcggtcgaagcgcagttgaagaaattgtcccatacctgttttcaggtgctggcctatgaaccgtatctggcgttgtgcgaacgcatgaaccagaaggtaccgggcgatttcgccaaaaaaacgttgctggtcacgaccggttcagaagcggttgaaaacgcggtgaaaatcgcccgcgcggcgacaaaacgcagcggcgctatcgcgtttagcggcgcttaccacggtcgtacccactacacgctctctctgaccgggaaagtacacccgtactctgctggtatgggattgatgccaggccatgtctaccgcgcgctttatccttgcccgctacacaacatcagcgacgacgacgcgatcgccagcattgaacgcatctttaaaaatgatgccgcgccggaagatatcgccgccattattattgagccggtacagggcgaaggcggattttacgccgcctctcccgcgtttatgcagcgactgcgcgcgctatgcgaccaacacggcattatgttgattgccgacgaagtgcaaagcggcgcgggccggaccggtacgctgttcgccatggaacagatgggcgttgcggcagatattaccacgtttgcgaaatcgatcgccggcggctttccgctggcaggcgttaccggccgggcagacgtgatggacgctatcgcgccgggcgggctgggcggcacctatgccggaaacccgattgcctgcgccgccgcgctggcggtactggacattttcgagcaggaaaatctactgcaaaaggcgaatacgcttggcaaaacgctgcgcgatggcctgatggagatagcggaaacgcaccgtgagattggcgacgtgcgcggactgggcgccatgatcgccattgagttgttcgaaaatggcgaccccggcaaaccgaacgcggctctgaccgccgacattgtgacccgcgcccgcgagaaagggttaattctgctctcctgcggtccttactacaacatcttgcgcatcctcgttccactcactattgaggcctcgcagattcggcaaggcctggagattatcgcccagtgctttgatgaggcgaaacaagcgtaatgtccaataagcagcgtcgggtggcgacgtaactgtcttatccggcctacaaaaaccgtttcgattgtaggccgaataagccaggcgccatccggtaaacgagcgcaataacaataaagaggttttaggatggggcaattgtcagaatcacatgcattagggggcgggctgaaatcacgccacgtcaccatgttatcgatcgccggcgtcatcggcgccagcctgtttgtcggttccagcgtggcgattgcggaggccggccctgcggtactgctggcctatctgttcgcaggacttttagtcgtcatgattatgcgaatgctggctgaaatggccgtcgccacaccggataccggatctttttccacctatgcggataaagcgatcggcccctgggccgggtataccatcggctggttatactggtggttttgggtgctggttattccgctggaggccaatattgccgccattattctgaattcatggataccgggtattccggtatggctattttcattagtgattacgcttgccttaaccggaagcaatttattgagcgtcaaaaattacggcgagttcgaattctggctggcgctatgtaaagtaattgccattctggcgtttatcgcgctgggcgcgacggcgattagcggtttttatccgtatgctgaggtaagcggtatctcccggctctgggatcacggcggttttatgcctaacggcttcggcgcggtgttaagcgccatgttgatcaccatgttctcttttatgggcgcggaaatcgttactattgctgccgcggaatccgatacgccggataaacatatcgtacgcgccaccaattctgttatctggcgaatttccatcttttacctgtgttccatttttgtggtggtggcgctgatcccgtggaatatgccgggtctgaaaagcgtaggttcgtaccgttcggtactggagctgcttcatattccgcacgcaaaattcattatggactgcgtgattttattgtcggtgaccagttgtctgaactccgcattatataccgcctcccggatgctctattcccttagccgccgcggcgatgctcctgcgataatgggaaaaactaaccgtagcaaaacgccctgggtagcggttctcctctctaccggcgcggcctttttaaccgttatcgtcaattattacgccccggcaaaagtgtttaaatttcttatcgacagttccggcgccatcgcgctgctggtctatctggtgattgcgatttcgcaattgcgaatgcgtaaaattctgctggcgcagggcggagaaattaagctgaaaatgtggctttatccgtggctcacctggctggttatcggctttatctgctttgtcctggtggtgatgctatttcgaccggcacagcaactagaagtcatttcaacggggctgttagggctgggcataataggtactgtccccattatgtctcgctggaaaaaactgataaggtggcaaaaagcccccctgcaaaacctacgttagttattcccggcgtcagccgggaagcttctcaggagtaaaagatgaccgccctttcccaaccgacggccatagatggctatcgctggcttaaaaatgacattattcgcggcacttatcagccggatgagaaactgcggatgagtttattaaccgcccgctatgcgctcggcgtagggccgctgcgtgaggcgctgtcgcaactggtggcggaacggctggtcaccgtggtgaatcaaaaaggctatcgcgtggcatccatgtcagaggcggaactcctcgatatttttgacgcgcgcgccaatatggaagcgatgctggtacgcctggcgattgaacgcggcgatgatgcgtgggaggcggagatcctggcgcgagcgcatatgctcagcaaactggaagccagcgatgccagtgaacatatgctcgatgaatgggatcagcgccaccaggcgttccattccgccattgtcgccgggtgcggctcccactatctgctacagatgcgcgaacgcttatttgacctggcggcccgctaccgctttatttggttacgtgaaaccgttctgtccgtcgagatgctggaagataaacatatccagcatcacacgctaaccgaagcgatactggcgcgcgaggcggcacgcgccagcgaattaatgcgtcagcatttgctgacgccgattcccattattcgccaggcgatggcagggaaaatgtagcctggcgcgacctgatagccattattcttcaggaatacgcaacacttgtcccggatatattttttccgggcttttcagcatcggtttatttgcctcgaaaattttattatacagattggcgttaccatacacttgctttgaaatagcgctcagggtgtcgcctgattttacggtataaaactgactttcagccgccggcgtcgtggttttaacctgatcgtcaacgctgctaatcccggcgatattccccacggcaaccagaattttttcttttgcctcctgactcagcccatcacccgtcactgtcgcttttccatcagctatttgcacattcactttgtcagcgtcgggtattcccgttttatttaaatgttcctggacttttttcgcctgatcgtccttatcatgattagcggttaccgcgtcccagagtttttcacctgcatcttttacaaaattgaaaagtcccatattcacctcgcttgtcaaaaatacacacaaagaaaagtgtagcagagggaatgaggttatcctgataagcggcgcttatgcgccgccggtggccggtaattaatgacgcatctgaacccaaaatgcgtggataagccccggaatatatccgagtaatgtcagcaggatattaaggataaatgcccaaccgaacccttttcctaaaagtacgccgagcggaggcaaaataatcgtaaatacaattctccagaaacccatatacactccatacaagcaaaattagtcattgtttaaaaagagattttatctctaagcatagtcagtttacctgagcctgccagtcgcgcgccgcgcttttaccctcctttacgctctttacgctggcattaggttgatgtttattttagaattaactaaatttagaaaatacttaaataactatgacagagcttgaacaacttcaggccagcgcagaacaggcggcggccctgctcaaagcgatgagccacccaaaaagattactgattttatgtatgctttgcggttcgccaaaaaccagcgcaggcgaactggcgcgcattaccgggctaagcccctccgcgacgtcgcaacatctggcgcggatgcgggaagaagggctgattgatagtcaacgcgatgcccagcgcattcactatttcattaaaaatgaggcggttaatacgattatcgccacgttaaagaatctctattgtccataaggaggcacgatgtccattgggatagtttccccccgtgaggcgcaagcgctgatagcgcaaggcgcgaaactgattgatgtgcgcgacgccgatgaatatctgcgcgagcatattccacatgcgcaactggcgccgctctcccggcttgaacagggcgatttgcccgccaacctgcgagcggaacagattatttttcactgtcagtcaggtaaacgaaccagcagcaatgcagcaaaactacaggccattgccgcccctgctcaggtcagtctactggaaggcggtatcgacggatggaaagcggcaggattgcccgtcacagaagacaaatcgcaaccgttgccgctgatgcgtcaggtgcaaatcgccgccggcgggttggcgttgcttggggttattatgggctatacggtccacggcggctttttcctcattagcggttttgtcggggccgggttaatgctggcaggcatgaccggcttctgcggaatggcgcgactactggaaaaaatgccctggaatacccgtactcattaagcggtaccttcaccacgcgtcggtaagtgtgtagtagactgaaggcgggtttataccattgttcaacaggagggcgtgatgttcacaccaggcgatatcgtacagccccgaatgggtgggccgaaactgaaagtgattgaagtcaacgaggatcatattgtcgcggtacaggtcggtaatgaaccgggcgaaaaattgatcctcaaagcggcagatgtcaccccctattgcgaagagggcgattttggcgtgtgctgatttatcaaaatgagcatggcgcaacgttccctgagtcccggttaatagagacaggaaacgaagcgccatctgttaaaagctatccgtgattagattaagaaatcatccagagatttccccgccgccagcgcctgggcaatcggtttaggcgtacgaccttgtccggtccaggttttttcttcgccattgaaatcagtaaaacgatattttgccggacgcggctggcgctttttagcagaacgcggcattgctgaatccatggcaaataactcttccgggttaataccgtctgctttcatcagctccagaaaggcattaattttctcctgcttctcggcaagctggcgttgctgcaattcttcttcttcgcgtctttctttagtgacaaccctgaatttttcgagcatttcttcaagaacgtcaatggagaattcgcgagccatagcgcgcagcgtgcggatattatttaagttctgtaacatcaaattcatatcaataaaaaccttttaacgcagaaaacaaaaaactattacaggcggtattgtatgcgattgttgattatatttccagatcctaaagttcatacagatatacacagcataactcgattaattatattaatctgttaaccagaaggttatattcattaccccctgcgtgtttcaggttattctgcctacggtatatctgtaggtttcccgtttggctgtttatagcgtattgcgtatctcagtaaccgcggtgaccctcacggtggctgaccttatacagaagtgaatatttcagcacaataagagattaaccattcaaaaatcatcatcagagctttatgctaaaaatcagtctgcaatggctataattatgctgagaaaagtagagcgcgtgccgttagccgagaatacatcgcatctgacaacatttggaatgtggctgaaaatcgccagaaaaacaatgcattataatgcattgatttaaaagtaattaatgactaacaacaacgaaaatctcgccgcgagcaaaaaacacacaatcacagagtattttatcgacaaaaagcctataaataaaaatattacactagttgatagttattatatagggatatactctatgcaaagacaaaagtgctttatgatttcactaccaaccatcacctcattctgatcgatacgctacaaggagcattaacatgttctctccacagtcacgcttgcgtcatgccgtagcagacacgtttgcgatggttgtttactgttctgttgtgaacatgttgatcgagatattcctctccggaatgagctttgagcagtcgctttcttccaggctggtggcgatacctgtcaacattttgattgcatggccatacggcgtttaccgcgatctgattatgcgcgtcgcgcgtaaggcaagcccggcgggatgggccaaaaacctggcggatgtattggcttatgtcacctttcagtcacccgtttatattatcatcttgctgaccgtcggtgccggctggcatcagatagtggccgccgtgagttcaaacattgttgtttcaatgttaatgggcgcggtttatggctacttcctggattattgtcgccgcctgtttaaagtgagcagctatcatcaggctaaggcgtaagttagcgtcgcgactggcattgccagtcgcgcttttagtcggttttttcgtcgccaaaaagcccattcagataacgttctaacgctattcgggagctaaagccgtggggaataccgtaatgttcgtgggtctcgccgcctaaatagagcggaaagttttggtaatgatcgcaggttttaatatccgaagccgggtcagccagtgatgagctacggtcttttaatctggggtgaatgatcagcgcggtacgccccatacgcgcctcgcggttaacataaacataattctcgccgcgtcgataaccatacgtcttattcgtcaccacatcgacggtaaaccctgccttttccagtacccgcgccacctcgtcaggtcgtaaatacatattttatcctcattctcttgtactgcgggcttaccttacccgatagcgcgttatcaacgctttcagaaaagtccagaaacgcatgatatcgccgtaacaagcctcagcaggtaaaaatatgaactacactgaaagctacatcgaaatcaatggaggatcatatgcttaacaaaccgaaccgaaacgacgtcgatgatggtgttcaggatattcagaatgatgtcaatcgattagccgacagtctggaagatgtccttaaatcctggggaagcgatgcgaaagacgaagccgaggctgcgcgacgtaaagcacaggcgttgctgaaagagacccgggcgcggatgcagggtcgtactcgcgtaaaacaagccgcctgtgatgcgatggggtgcgcggatacgtttgtgcgtgaaaaaccctggtgtagcgtaggaaccgccgcagcggtggggatttttatcggggcgctgcttagcctgcgtcgctaacgacgtgcgctgccggatggcgacatactttatggggcctgcatcattgccgcaggcccaggtcgcgccattcggcgaaacggttactgtatcgcctgtcgaagctgacatgcgacctgtttcgccatgccagcggaagtaatattggtaaacgacagtaaaatgcccccctttcctgacgaaaccactcgccaacggcttagcgcctgtaccgccagtccggcctgattcgcttttgctacctgcgctttatcatcaccttcaacctcaataaccaattgaataccgcctttctgtaatgtcacgacaaatccctgttctgccagcgcctcttcaatccataaccgtcgctgagcataatgttgacgcatctttttcagatgccgccagaaatggccatcacggataaaatcagccagcgtgtgctgccataacaacggtacgctacagggcatcagcgacgcctgctggcggaaatgctcaatctgctttatcggcaccaccagccaggcggtacgtaatgccggaaagagcgacttactgaacgttccggcgtaaatcactcgctgcggggcatccagactcttgagcggcggaagtggtttaccgtgataacgaaattcgctgtcgtaatcatcttcaataatccaggcctgcacattcgccgcccatgccagaagttgccgtcggcgagttaacgacagcgccacccccaacggactttggtgggcgggcgtcaccaatgcaaagcgcccctgcgggcaatcccgcatccccgccgcgacattcagcccatcggcatcgaccggaatcggcgccagcgtaatcccctcctgcgttatcaccgggcgaattaacggaaagccgggatcttccacccacatgctgtctcccggcacagacaatgtacgcaggattagccgcatagaatccgcataaccggaggtaataaatacctgttccggcagacattcaatgctacgcgaaacccgcaggtaatcgactatcgcctggcgcaaaatcgcctcgccgcagacgtcgcctaatgccagatcgaagcatgtctgcgtgcgcaaccgacgccccattactcgcgcccacttctcgcgtggaaagagatccagcgccggtaaccccatctgaaagggtttcggttccggactttctccggcaaaaacagcgggtatcggcggcgccgtctcaaaccgtagagcgttgctcacaaacgtgcctgcctggccacgtcgctccagccagccctgcgccaccagctcgccataggcattttccaccgtggcgcgagaaacgcccagttcctgcgcccacgtcctactggaaggcaaacgcgttccgggcgcgagttctccttgctcaatggccgtttttaactgacgagcgatgtgctgatagcgcggcatatggtctgctttttctgtaaaaatatggctctcttttacagaccattatagtgctacagtgctcgtcatcaacacgaggagaaacatgatgacaacgttacgccaaccctattatgaactgagcccggaggtttacagcgctctggtgcaggcgaaaaacgcgctggaaaagagcacgcttgaccccacgctgatggagctgatttacctacgtgtttcgcaaataaatggttgtgcattttgcctggagatgcacagtaaagcgctgcgtaaggctggcgtgaatcaagctaaattagatgcgctggcaggatggcgggtaagtcaccatttcagcgagcaagagtgcgcggcgttagcctgggcggaatcggtgacgcacattgctgaaacccacgccgaagataatatttacctgccgctgctcgatcatttcagcgcgcgtgaaatcagcgatctgaccttcgccatcggtttaatgaactgctttaaccgtctggcgatcggtatgcgaatgtgacgcattgttgccggatggcgctgatgtcagccaactctgttatgcgtgaacctgcaggccggatcgggcgttcacgccgccatccggcaaaaattagccatgcctcccctaccccgcggcgttcatcagcggcgttaaaatcaatcgaaaattcccatatcttgtatggttgaatcttaattcaactacatctagtatttcctgtatcaacacacgacaatccgacgcgtttcatcgcgccgttttctcattttaaatggaaatacgaatcatgagcattactatttacactcgcaataactgtgttcagtgccacgccacaaagcgggcgatggaaagccgtggatttgaatttgagatggtgaacgtcgatctggtgccggatgcagcggatacgctccgggcgcaaggatttcgtcaattaccggtggtgatggcgggcgatttgagctggtctggcttccgcccggacatgattaaccgtctgcacccgacaccccacgcggcaaacgcatgagcgcgctcgtctacttctccagcagctctgaaaatacgcaccgctttatgcagcgtctggggctgcctgccacgcgtattccgctcaatgagcgggagcgaattcaggtagacgaaccgtacattctggttgtgccgtcatacggcggcggcgggatggccggtgcggtgccgcgacaggtgatccgctttttaaatgatgaacacaaccgggcgcgcattcgcggcgttatcgcctccggtaatcgcaatttcggcgatgcctggggatgcgctggcgatgtgatagcacaaaaatgcggcgtcccctggctgtaccactttgagctcatgggcacacaacgcgacatcgataatgtccgaaaaggagtaaatgaattttggcaacaactaccccggagcgcgtaatgcaggaaaccatggattaccacgccctgaacgcgatgctgaatctttacgataaagcaggccatattcagttcgacaaggaccagcaggcgatcgacgccttctttgccacccacgtccgcccgcattccgtgacgtttgccagccagcatgaacgtctggggacgctggttcgggaagggtattacgatgacgccgtcctcgcgcgttacgaccgcgccttcgtccttcgcctgttcgagcacgcccatgccagcggctttcgcttccagacgtttcttggcgcctggaagttctataccagttacacgctgaaaaccttcgacggcaaacgttatctggaacactttgaagatcgggtgacaatggtggcgttgacgctggcgcagggtgacgaaacgctggccacccaactgaccgatgaaatgctttctggtcgctttcagcccgctaccccgacttttttaaattgcggcaaacagcagcgtggggaactggtctcctgcttcctgctccgtatcgaagacaacatggagtcgatcgggcgggcggtgaattcggcgctgcaactctccaaacgcggcggcggcgtcgcgtttttactctccaatctgcgcgaggcgggcgcgccgatcaaacgcattgagaatcagtcttccggcgtgatcccggtgatgaaaatgctggaagacgcgttttcgtatgccaaccaacttggcgcgcgccagggggccggcgcggtttatctccatgcgcaccatccggatattctgcgttttctggataccaaacgagaaaacgctgacgaaaaaatccggatcaaaacgctctctctcggcgtggtgatcccggatatcaccttccggctggcgaaagaaaacgcgcaaatggcgctcttttcgccctatgacatacaacgacgctacggcaaaccgtttggcgatatcgccattagcgaacggtacgatgaattaattgccgatccgcacgtgcgcaaaacctatattaacgcccgtgacttttttcaaacactggcggagattcagttcgaatccgggtatccctacatcatgtttgaagatacggtaaaccgcgcgaatcccattgctggtcgcattaatatgagcaacctgtgctcagaaattttacaggtcaatagcgcttcccgttacgacgataaccttgactatacccacatcgggcatgacatctcctgcaatctcggctcgctgaatatcgctcacgtcatggattcaccggacattggccgtaccgtagaaaccgctattcgcggcctgacggcggtgtcggacatgagccatatacgcagcgtgccctcaatagccgccggtaatgccgcctctcatgccatcggtctgggccagatgaatctgcatggctatctggcgagggaaggtattgcctacggttcgccggaggcgttggatttcaccaatctctatttttacaccattacctggcatgccgtgcatacttcaatgcggctagcccgcgaacgcggcaaaaccttcgccggatttgcgcagtcgcgctatgccagcggcgactattttacgcagtatttacaggacgactggcaaccgaaaacagcgaaagtcagggcgctatttgcccgcagcggcattacgctgcccacacgagaaatgtggctaaagctgcgcgacgatgtgatgcgctatggcatctataaccaaaatttgcaggcggtgccgccgaccggttcgatttcttacattaatcatgcgacctccagcattcatccgattgtggccaaaattgagattcgcaaagagggcaaaaccgggcgtgtgtattaccccgcgccgtttatgaccaatgaaaacctggacatgtatcaggatgcttacgatatcggtccggaaaaaattattgatacctatgccgaggccacgcgccacgtcgatcaagggctgtcgctcaccctgtttttccccgataccgccacgacccgcgatatcaacaaggcgcagatctatgcctggcgaaaaggtattaagtccctgtattacatccggcttcgccagttggcgctggaaggtactgaaattgaaggctgcgtatcctgcgcgctataaggaaagccatatgaaattatctcgtattagcgccatcaactggaacaagatccaggacgacaaagatctggaggtatggaaccggctgaccagtaacttctggctgccggaaaaagtgccgttatcgaatgatattccggcctggcagacgctgagcgccgccgaacagcagctcaccattcgcgtgtttacgggacttacgctgctcgacactatccagaacatcgcaggcgcgccgtcgttaatggcagatgccatcacgccgcatgaagaggcagtgctgtcgaacatcagctttatggaagcggtacacgcccgctcttacagttctattttctccacgctgtgccagacgaaagaggttgatgccgcctacgcctggagcgaagaaaacccaccgcttcagcgtaaggcgcagattattttagctcattacgtcagcgatgaaccgctaaagaaaaagattgccagcgtctttttagagtcttttctgttctattccggcttctggttgccgatgtatttctccagccgcggtaagctcacgaacactgccgacctgattcgtttaatcattcgcgatgaagcggttcacggttattatattggctataagtatcagatagcgctacaaaaactatcggcaatcgagcgtgaagagttaaagcttttcgcgctggatttgttgatggaactgtacgacaacgaaatccgctacacagaagcgttatatgcggaaaccggctgggttaacgacgtcaaagccttcttgtgctacaacgccaataaagccttaatgaacctgggttatgaggcgttatttccgccggagatggcagacgtgaatcccgcaatccttgccgcgctctcgccgaatgccgacgaaaaccatgatttcttttccggctcaggttcatcttatgtgatggggaaaacagtcgaaaccgaagacgaagactggaatttttaaccttacgggcatgggaaataacgttacatttcccatgcctttatttcaagcaatagggagtcaaatcgcgcaaatattacaacatgtcctacactcaatacgagtgacattattcacctggattcccccaattcaggtggatttttgctggttgttccaaaaaatatctcttcctccccattcgcgttcagcccttatatcatgggaaatcacagccgatagcacctcgcaatattcatgccagaagcaaattcagggttgtctcagattctgagtatgttagggtagaaaaaggtaactatttctatcaggtaacatatcgacataagtaaataacaggaatcattctattgcatggcaattaaattagaagtgaagaatctgtataaaatatttggagagcatccgcagcgtgccttcaaatatattgaaaagggactatcgaaagagcaaatactggaaaaaacggggctatcgcttggcgttaaagacgccagtctggccattgaagaaggcgagatatttgtcatcatgggattatccggctcgggtaaatccacaatggtacgccttctcaatcgcctgattgaacccacccgcggacaggtactgattgacggcgttgatattgccaaaatatcagacgctgagcttcgcgaggtgcgcaggaaaaagattgcgatggtcttccagtcatttgcgctcatgccgcatatgaccgtgctggataatacggcattcggtatggaattagcgggcatcgcggcgcaagagcgtcgcgaaaaagcgctggacgccttgcgtcaggtggggcttgagaattacgctcacgcctacccggatgaactttccggtgggatgcgtcagcgtgttgggcttgcccgcgcgctggcaatcaaccctgatatcttattaatggatgaagcgttttccgccctcgatccattaattcgtaccgaaatgcaggatgagctggtgaaattacaggcgaaacatcagcgcaccattgtctttatttcccacgatcttgatgaggctatgcgtattggcgacaggattgccattatgcaaaatggcgaggtcgtacaggttggtacgccggatgagatcctgaataatccggcaaatgattatgtccgcacgttcttccgtggcgtggatattagtcaggtctttagcgccaaagatattgcccgtcgcagcccggtcggattaattcgtaaaacgccaggtttcggtccccgttcggcactgaaattattacaggacgaagaccgtgaatatggttacgtcattgagcgtggcaataaattcgtgggcgtcgtgtccatcgactcattaaaagcggcattaagccaggcgcaagggattgaagcggcgcttatcgacgaccctttagtcgttgatgcgcaaaccccactcagcgagttgctctctcacgtcggccaggcgccctgcgcggtgccggttgtcgatgaagaacaccagtatgttggcattatttcaaaacgtatgttgctacaggctttagatcgcgaggggggtaacaatggctgatcaaacgaatccgtgggataccgcacaggtggccgatactacgacgcaaacggctgatgcctggggaacaccggcaggcgtagccacggacggcggcagtaccgactggttgaacagcgcgcccgcgccagcccctgaacacttttctcttctggacccgttccataagacgctgatcccgctggatagctgggtcacagagggaatcgactgggtcgtcacccatttccgtcccctttttcaggggattcgtgtgccggtggattacatcctcaacggctttcagcaactgctgctgggaatgcccgcccctgtggcgattattctctttgcgctgattgcctggcaggtttccggcgtgggcatggggatcgcgacgctgatatcgctgatcgccatcggcgcgatcggcgcctggtcgcaggcgatgattaccctggcgctggtattgaccgccctgttgttctgcgtcgtgatcggattaccgatgggaatctggctggcgcgcagcccgcgcgcagccaaaatagttcgtccgctgctggatgcgatgcagaccacgcccgcgtttgtctatctggtgccgattgtcatgttattcggcatcggtaacgtgccgggcgtggtggtgacgattatttttgctctaccgccgattgtacgcctgacgatcctgggcattaaccaggtgcctgccgacttaattgaagcgtcgcgctcgttcggcgccagcccgcgccaaatgttgttcaaagtgcaactaccgctggcgatgcccaccattatggcaggcgttaatcagacgctgatgctggctctctcgatggtcgtcatcgcctcgatgattgcggtcggcggacttggccagatggtactacgcggcattggtcgtcttgatatggggctggcaaccgtcggcggcgtcggcattgtgattcttgccatcattctggaccgtctgacgcaggccgtcgggcgcgactcgcgtagccgcggtaaccgtcgctggtataccaccggtcctgttgggctaatcacccgccctttcgttaagtaactctcctgacgcccggtgacattgcgcttaccgggcttacaactccctaccataattaaaggaacaacgatgcgacataccgtgatatttgcctcagcgtttgccacccttgtcaccgccagcgctttcgctgccgacctgcctggcaaaggcattaccgtccaacctatccaaagcacgatttctgaagagaccttccagacgttactggtcagtcgggcgctggaaaagttgggttataccgtaaataagccgagtgaagtcgattacaacgtaggctacacctccatcgcctctggcgatgcgacgtttaccgccgtgaactggcaaccgctgcatgatgatatgtatgccgcagcaggcggagacaacaagttttaccgcgagggcgtcttcgtctccggcgctgcgcagggctatctgatcgataaaaaaaccgccgagcagtacaacatcaccaatatcgctcagctaaaagatccgaaaatcgccaaaatcttcgatactaatggcgacggaaaagcggacatgatgggctgctcgccgggctggggctgcgaagccgtaatcaatcaccagaataaagcgtttgatttgcaaaaaaccgttgaggtcagccacggtaactatgcggcgatgatggctgataccattacccgttttaaagaaggcaagccggtgctgtattacacctggaccccgtactgggtgagcgatgtaatgaagccgggtaaagatgtcgtctggctacaggtgccgttctcctccctgccaggcgaacagaaaaatattgatactaaactgccgaacggcgcgaactatgggttcccggttaataccatgcatattgtcgccaataaggcatgggcggagaaaaatccggcggcggcgaaactgttcgccatcatgaagctgccgctggcggatatcaacgcgcagaacgccatgatgcatgccggtaaatcgtctgaagccgatgttcagggccacgtagacggctggatcaacgcccaccagcagcagtttgacggctgggtgaaagaagcgctggccgcgcagaaataagatcgttttttatgccggataaggcgcagttcatgcgccgctatccggccaacgcaatctctcctcaaagcgcacgattcatcacgtcaccgttcccctttattcatcaacatccgctatgattgttttcccaggaaataattatctgaatcacgattaccataatgacgaaacccactcatgagcttagcccggcgctgatcgttttaatgtctgtggccacgggtctggcggtcgccagcaactactatgcccagccgctgcttgataccatcgcgcatcacttttcgctttccgccagctccgcagggtttatcgttaccgccgcgcagttgggctatgccgctggcctgttgtttctggtgccgctcggcgacatgtttgaacgccgaacgctgattgtctccatgacgttgctggcggctggcggaatgctgatcaccgccagcagtcagtcgcttagcatgatgatactcggaacggccttaaccggactgttctccgtggtggcgcagattctggttccgctggccgccacacttgcgacgcccgccacccgcggtaaagtggtcggcaccattatgagcggcctgttgctggggatcctgctggcgcgaacggtcgccggactgctggcaaacctcggcggttggcgcaccgtattttgggtagcgtcggcgctgatggcgctgatggccgtcgcgttatggcgcggactgccaaagctcaaatccgacacccatcttaactacccgcaactgttgggttctgtattcagcctgtttattcacgataagctgctgcgtacccgcgcactgctgggctgtctgacctttgctaatttcagcatcctctggacatcaatggcctttttgctcgccgcgccgccgtttagctactccgaggggatgattggcctgtttggcctggcgggggccgccggcgctttaggcgcgcgtccggctggcggatttgccgataaaggtaaatctcacctcaccaccacgttcggcttactgctgctgttactctcctggctggctatctggcttgggcacacctcggtactggcgctgattattggcattctggtactggacctcaccgttcagggggtacatatcaccaatcagacggtcatctatcgtttgcatccggatgcgcgtaaccggctcaccgccggctatatgaccagctactttatcggtggcgccgcggggtcgctgatttccgcctccgcctggcaacatgccggctgggccggcgtttgtctggcgggtgtcacggtagccttacttaatttactggtctggtggcgaggttttcaccgacaggaagccgtaaattaagcggatagtgagcgtttacctttgtttaagctccttagggtgttaaggagctccccagtctgttaaggttatgctattcatttatcatggttatttttataccggtgaagaataatataattctatggaaagccctgcatccccatctgctcccaggccaatagcgcccgttcaaggattcgaaggtcgttcaccgatagctatccgtgatattccggtggcttttgcatcgggttgtaaggccgtttacccggctttcgcccctcccgcttatcgttctctcctgattttttcatgcaggcactcacgcttttctcgtcattcctggatttgccgcaggcggcgctttaccgggcccaatgttcccgctgacgtctcagtctgcgtatcattggttgctttatagcctgaaagaatgattttgtattaataatacatttactttatttgtcactgtcgttactatatcggctgaaattaatgaggtcatgcccaaatggatagttcgtttacgcccattgaacaaatgctaaaatttcgcgccagccgtcacgaagactttccttatcaggaaattcttttgactcgtctttgtatgcacatgcaaggcaagctcctggaaaaccgcaataagatgctgaaggctcaagggattaacgagacgttgtttatggcgttgattacgctggagtctcaggaaaaccacagtattcagccgtctgaattaagctgcgcgctgggttcatctcgcaccaatgcgacacgcattgcagatgagctggaaaaacgcggctggattgagcgtcgtgagagcgataacgaccgccgttgcctgcatctgcaattaacggagaaaggccaggcatttttgcaagaagtgcttccgcctcagcatcattgtctgcatcaactctggtcatcacttagcacagccgaaaaagatcaacttgagcacatcactcgtaaactcctgacgcgtcttgatcaaatggagcaggaaggcactgttcttgaggcgctgcgctaaagcgccgacccgctcaaaaatccagattaataacaggaaagcggacaggccggcacgcgttactgctggcctttctgacaacaggtcggctcagccgatgtgaataataagatcgtggagaacaacatgagcgcaaatgcggagatccaaaccccgcagcaaccggctaagaagaaaggcaaacgcaaaacagcgctgctacttcttaccttgctctttgttattattgccgtggcatatggaatttattggtttttagtattgcgtcatattgaagagacagatgatgcttacgtggcagggaaccaggttcaaatcatggcgcaggtgtcaggcagcgtgacgaaagtctgggctgataacaccgactttgtaaaagagggcgatgttctggtcacgctcgatcagactgacgccaaacaagcgtttgaaaaagccaaaacggcgctggcctccagtgtgcgccagacgcaccagttgatgattaacagcaagcagttgcaggcgaatatcgacgtgcaaaaaaccgccctggcgcaagcgcaaagcgaccttaaccgtcgtgtgccgctgggtaatgccaatcttattggccgggaagagctgcaacacgcccgcgatgccgtcgccagcgcgcaggcacagctggatgtcgccattcaacagtacaatgccaaccaggcaatgatactcaacagtaatctggaagatcagcccgcggttcaacaagcggcgaccgaagtgcgtaacgcctggctggcgctggagcgtactcgcatcgtcagcccaatgactggttatgtctcccgccgcgccgtccagcctggcgcgcaaatcagccccaccacgccgctgatggccgtggtgcctgcaaccgatctgtgggtggacgctaactttaaagaaacccaattagcgaatatgcgcattgggcagccagtgacggtgattactgatatttatggcgacgacgtaaaatacaccggtaaagtcgtcggtctggatatgggaacaggcagcgccttctccctgctgcccgcgcaaaatgcgacgggtaactggattaaagtggttcaacgtctgccggtacgcgtcgaactggacgcccgccagttagaacaacatccgctgcgtattggtttatcgacgctggtcaccgtggataccgctaatcgcgacggtcaggtactggccagccaggtacgaacgacgccggttgccgaaagtaacgcacgcgaaattaatctcgcgccggtcaataaactgatcgacgacatcgtacaggctaacgcgggttaatcctgaggtgcgtgtgatgcaacagcaaaaaccgctggagggcgcgcagctcgtcatcatgacgatcgcgctgtcgctggcgacattcatgcaggtgctggactccaccattgccaacgtggcgattccgaccatcgccgggaacctgggttcttccctaagccaggggacatgggttatcacctctttcggggtggcgaacgctatctcgattcccttaaccggctggctggcgaaacgttttggcgaagtcaaactgttcatgtggtcgacggtcgcctttgccgcggcctcctgggcctgtggcgtatccagcagcctgaatatgctgatcttcttccgcgtggtgcagggcgtggtcgccgggccgctgattccgctctcgcaaagcctgttgctgaataactatccgcctgcaaagcgctccattgcgctggcgctctggtcaatgaccgtcattgtcgcgccgatttgcggcccgattctggggggctacatcagtgataattaccactggggatggattttcttcatcaacgttccgattggcatcgccgtcgtcctgatgacgttacacacgctgcgcggacgtgaaacgcataccgaacggcgacgtattgacgccgtcgggctggcgctactggtgattggcatcggcagcctgcaaattatgctcgatcgcggtaaagagctggactggttctcctcgcaggaaattatcatcctgaccgtggtcgccgtcatcgccatcagtttcctgatcgtctgggaactgaccgacgatcaccctatcgtcgatctttctctttttaaatcgcgtaacttcacgattggctgcttgtgcatcagccttgcctatatgctctatttcggcgccattgttctattgccgcagcttttgcaagaggtgtacggctataccgcaacgtgggcaggtctggcgtcagcgccagtcggtattattccggtaattttgtcgccgattatcggacgcttcgcgcataaactggatatgcgcaggctggtcacgttcagcttcattatgtacgccgtctgtttttactggcgcgcctggacgttcgaaccgggtatggatttcggcgcttccgcatggccgcagtttattcagggatttgccgtcgcctgcttctttatgccgctgaccaccattacgctctccgggttaccgccagaacggctggcggcggcatcaagcctgtcgaacttcacgcgaacgctggcaggttccatcggcacctcgattaccaccactatgtggaccgatcgtgagtcgctacaccatgctcagctcaccgagtcggttacggcgtataatccaaacgctcagactatgtacgataaactggaaggcttagggatgacgcaccaacaggcgtcaggctggatagcccagcaaatcacgaatcaggggctgattatttccgccaacgaaatcttctggatgtcggcggggatcttcctggtgctgctcggcctggtgtggttcgccaaaccgcccttcggtgcgggcggcggcggtggcggcgcgcactaactatctgataaaagggatctgcggatcccttttttagtagaccaacaatcagaagaaatatttgaatctcagacgcccgccgtaacgcgcatcttcactgttatcgccattattcggattggcctctacccatgaagcataggcaccgaggtagatgttaaagtttttcatatccatcacgttggggaataaatatgaggcatgaatagtgtgaatgtcataattgccgggatcggtgacccagcaatcgtcctcacaaacggcatcgatattggtagcattaaaggcttcgattttgttatgcgcatagatataacccagttcaaatcgatgccacaacgcattcaccccggcggtaaaatctgtctcatcggtcgcgtccatataggcggtattcaggttaatcactgcgccatcttccgggtcagttttttgaccattccaggtcatggtaaaaccatagcccgtacgatctgactgatcgatccacttcccattctcataatagccataggcgttgttaacgacgttactttccatcgctatcgccgttgaaaaacgcccgttttgccaggcgataaccggacggacgtaagccacgtttttatcgttgcttaaatccattccgtggtactgcttctcggtatataacgtactgccattttccagcaatgtgttaacttcgaaataccagttgtcgatggttttactcagcaggaagttacccccgctgtcgctacgtccccgtccttctttcatcatatagatatagccgtaaccgtcactgtaaagatcgttcgctgtattccccgaatattcaataaacgtatcctgattcagcgggaacatatcgtaggcttcaaaacgaccaaccttaattttccagtcattctcacgaccaaagaagaaaacggcatcatcaaggttcatttttccggtcaggtccgccagaggctgtacagagaatccggcaaaattaccgttgtccagccgctggtagccatcaaagcccagcaacaggcgtccgttaatatcccagcgttcattggttcccggtgcccaatctttattcgctgacgttctcgtcgatgtcagactaccggaacggcttgccgcatccatattaaattcgacatcgccatagaacttaatatcgctgaatccggataaagtcagcttcggcggcgttttatctgctgcaatgggctcggcggactggacattcaccgtcggcgtagcggcgacctgctgctgtttcaacgagcgaatttgcgcctcggcatcggatgcccgtttttcagcattaacaacacgttgctccagttcagccagacgctgctcaatagtgatattattcgctgcccaaaggttatgagaaaagcaagcaccgatcatcagcgctaaatatttagccttcattttttatcccttaagtttgatgtataccagataagatttgctaaaaaccccatcgaccggctattagtagagtcttgttattacctggatatctggcgcattccattatgtttttctattaattatttatgatttttagtttatgtgatcaatacactctggcatcgtgagttatccgccttttctgtttaccagatcacattttattatttaacaggccaggcattacttaatttaaaatgtattctcgccgcaaatataataaacgcaaattatattaagcaataaaaaaccccggccataaaccggggttaatttaaatactggaaccgcttacaaataagactaaatatgcagttcctgcagtttttctttcggcagcgccagctctttattgctgttcacgcgcacatcacgctccagaatatgacgggcaatgtcctgcgcttcactgagcgagtgcatctgatacgtaccgcactggtaaacgttcagctccgggatctggttttgatcctgcactttcagcacatccgccatcgccgctttccaggcgtcggcaacacgctgctcgtccggcgtgccaatcaggctcatgtaaaagccggtgcggcagcccatcggcgagatatcgataatctcaacgccgttaccgttgaggtggtcgcgcataaagccagcaaacagatgctcaagcgtatgaatccctttttccggcatcacttctttgttcggaatgcaaaaacgcagatcaaacacggtgattgcgtcgccatgcggggtgttcatcgtttttgcaacccggaccgccggcgcttgcatccgggtatgatcgactgcgaagctatctaataatggcatttagtcacctccgataattttttaaaaataaactgaactctttgttccggggcgagtctgagtatatgaaagacgcgcatttgttatcatcatccctgttttcagcgatgaaattttggccactccgtgagtggcctttttcttttgggtcaggcgtgttttgcaagccacgcggcaaacggctcggtatccgccgcctcaatctcctgctgacgacgtactgaagcgtcacgttcagcaataaactcttcttcctgtaaaatctccagcggctcttcgcgtaacagattacggtaagcctcaccgaacgctttcccggtgccgccaatgccttcatcaatcatagaccgtaggatccgggcggagaatgtcagttcaggattatcaaagcaggcgaccaactcgtcacacaccttttgatactcctctcccccgtggatactgtccagcgtttgcgccacgcgtttcagatcgcggaaaagatctttcccgactttgggcagcgggaactgcgcagtttcacagccaatgcctaacgtcaggcccggcttacgcccttccagaataacgcgattccagttagtacgcgtacataacagctcatcgctactcatttccggcgcatcggccaatacgcaccagaccataaacagatcgaggaagcgcacctgttgctcgtctacgccgatcggtgagaacggattaatatcgagagaacgaacttcaatatactcaataccaccacgcagaagcgcgtcagaaggcgattcgccgctgcgcgtcacgcgcttgggacgaatgggcgcgtacagctcattttcaatttgcagaacgttgctgttaatctgtagccgcttaccgtctttttccacaccaatccgtgcgtactcctcggaaggggttttaatcgcgcgcttcagacctgcaacgtattcatgcaaatcgttaaacgtaattccgagattgctttgcgacttattggtatagcccaaatcactcaaacgcagcgacgtcgcatacggcaggtagtacatgccgcagtccgttttttcaaacggtaatgtggttggctttccttgcaggaaagaggaacaaatggccggagacgcgccaaacagataggggatgacccagccaaaacggtaatagttgcgaatcagacgaaaatagccggcagaaattttttcttttgccgcttcgccttccgtaacgccgcatttcgcctgccagaacgccatcggtaatgaaaaattgtaatgtacgccggagatggtttgcatcaaagcgccataacgatttttcagcccttcgcgatagagcgtcttaaaacgcccggtattggatgtgccgtactgcgccagctctatgtcctgcccttccgcaatatagcagggcatacttaatggccacatccgctcatcgcccagtttcctggccgtataccgatggagatcgcgcataaaggtgagcatatgctggatatcgccatcgactggcgtaataaactccagtagggcttccgcaaaatctgtggtaatccatttatgggtcagcgctgaacctaacgcttcaggatgacctgttgtcgccagcgtgccatcagcattgacacgcagcgtttcgcgctctaacccgcgctgtatcccctttaacgcctgaggatgtttttccagccaggccagagcctgtgatacgtccgggatcaaattgacctcccgcctgtccaaatcgttttaataagcataactgtaatggcggccatacatgccaaacctacaattattaccaccacatcatgccctgaaccgtcgccgctgcgagcgcaacatagcgcagcgccttaccaagacacaaaaaaaagatcgtccgcccccacgggatgcgcatccatcccgctaacaggcacaacaaatcaccgatgaccggcatccagcttaataatagtgtggctgcgccataacgctttagccagccagtcgctttttcctgccaacgcgacgttttgcgcagcggaaagaaacgcccaagaataacgttagttacccctccaaggctattacccattgttgctgttaagactaagacccagggatggctgacgccggagaccagcatagcaaccaaaaccacctcagaattaccgggtaacagcgtcgcgctgagaaaactactggcaaacagagacaggagcgacagtccgtcactcacaatagtcggacatccacggcatccattcccgccgcccgcgccgcctgtaaaccaaaatcggcatcttcaaataccacgcactgcgtcggcatgacgcccatccgctgggcgcacagtaggaaggtgtcaggcgcaggtttgtgatgctgtacgtgatctgccgccacaaccgcatcaaaataacgacgcagccccagatgcgctaacagggcttccgcgatagcgctttcgctaccggtaccgaccgacatgggacgccgcccatgccacgctttaaccacctcaaccagcggcagcggttctacgcagtccagcaggatgctttttaccgcgtcggttttctcacgcgccagtgacaggggatcaagatcggcatggttaagctcaatgattgactgggcgataagccaggttggcgaaccgttaagcgcgaccattgcctgttcatcaaaacgaagaccatagcgccccaaaacctcacgccacgctttgcgatgcgtgggttcggtatccaggagagtaccgtccatatcaaaaatcaaaccagcataacgtgcgtacatcgtgttctcgcaaaccgaataaccagacagtactttatcgcaattggttgattttgtcgctaatagagatgaagaggtatattcaggataagggggaaaagcgattgcagggcagtaacgtatccgggaggattactcgcccttcgggccgttgctgatgcaacgttatccttctgatgccagcggtgattaccgctatcttatctgcatcttcatcgctgaaagtatggagaatatggtgcatccgggaggattactcgccttacggctcgcccttcgggccgttgctgacgcaacgttatccttcctggtgccagcggtgattataactatcttatctgcatcttcatcgctgaaagtacggagaatatggtgcatccgggaggattcgaacctccgaccgctcggttcgtagccgagtactctatccagctgagctacggatgcattggaaatgatgtttactacaagatttgatgtcgcatttactgccacactaaataagatggtgcatccgggaggattactcgccttacggctcgcccttcgggccgttgctgacgcaacgttatccttcctggtgccagcggtgattaccgctatcttatccgtatcttcatcactgaaagtacggagaatatggtgcatccgggaggattcgaacctccgaccgctcggttcgtagccgagtactctatccagctgagctacggatgcatcggaaaacttgctttactgccgatattgataccgcggtgaaagccgtatcaagtaagagatggtgcatccgggaggattcgaacctccgaccgctcggttcgtagccgagtactctatccagctgagctacggatgcatcgggaaacttactttactgcagattttgataccgcggtgaaagccgtatcaggtaagagatggtgcatccgggaggattcgaacctccgaccgctcggttcgtagccgagtactctatccagctgagctacggatgcaaatggcggtgaggcggggattcgaaccccggatgcagcttttgaccgcatactcccttagcaggggagcgccttcagcctctcggccacctcaccacacgcctcttacgagtgcttcgaagaacttgttctgctcatcgtcgctgcgtggcgcacatattactttctgggacttataagtcaaacaatttttccagagcttttatcgtttgcacacttcacgctcaattagtctgtaaaaaagccaaaaagagtgttttatcaacagataatttgatgacacgctggccgccaaaagcgcaccatatcaacagtgaggttgaaaaaagtcatgaagggacaacgcgggcgagcgagaagagaggctgcgtctcacccgaaaagtgagacgcgaaaaccttagtaactggactgctgggatttttcagcctggatacgctggtagatctcttcacgatggacagaaacttctttcggggcgttcacgccaatacgcacctggttgcccttcacccctaaaactgtcacggtgacctcatcgccaatcatgagggtctcaccaactcgacgagtcagaatcagcattctttgctccttgaaagattaaaagagtcgggtctctctgtatcccggcattatccatcatataacgccaaaaagtaagcgatgacaaacaccttaggtgtaagcagtcatggcattacattctgttaaacctaagtttagccgatatacaaaacttcaacctgactttatcgttgtcgatagcgttgacgtaaacgccgcagcacgggctgcggcgccaacgaacgcttataattattgcaattttgcgctgacccagccttgtacactggctaacgctgcaggcagagctgccgcatccgtaccaccggcttgcgccatgtccggacgaccgccacccttaccgcccacctgctgagcgaccatcccaatcaattcccctgctttaacccggtcggtcacatccttcgacacgcccgcaatcagagaaaccttaccttcaacaaccgttgccagtacgataacggtagaccccagttgatttttcagatcatcaaccatggttcgcagcattttcggctcaataccagcaagctcgctaaccaggagcttcacgccgttgagatcgaccgctttactggaaagatttgcactctcctgcgctgcggcctggtccttcaactgctgcaactctttttccagctgacgtgtacgttccagcacggcacgcactttgtcgcccagattctggctgtcgcccttcagcagatgcgcaatatcgtttaagcgatcgctttgcgcatgaacggtggccatagcgccttcaccggttaccgcctcaatacgacgaatgcccgctgcggtgccggactcagagataatacggaatagaccgatatcaccggtacgactggcgtgagtaccgccgcacagttcagtagagaaatcgcccatgctcagaacgcgtacacgttcgtcatatttctcgccaaacagcgccatggcccctttcgccttcgccgcgtcgagatccatgatgttcgtttcaatcggcaggttgcggcgaatttgcgcattcaccaaatcttcaacctcacgaatctccgacggcttcatcgcttcattgtgcgagaagtcgaagcgcagcactttatcgctaaccagcgaacctttctgcgcaacgtgtgtcccaagcacctggcgcaacgccgcgtgcatcaggtgcgtggcggagtggttcagacggatacgtgcgcggcgcgcttcatctacgtcagcctgtaccgcatcgcccactttcagagcgcccgcagacaatttgccgaggtgaccaatcgcctgaccatatttttgcgtgtcgtccacagcgaaagtaaatccagcgcctttcagctcgcctttatcgccaacctgaccgcctgattccgcatagaatggggtctgatccagcacgacaaccgcttcctgtcccgcgttaatcgcttcaaccgctttaccatcgacaaacagcgcagtcactttgccgttcagttccagatggtcataacctttaaattcagaagcgctatcaacgcggatcatcgcgttgtagtccgcgccaaaaccgctagcttcgcgcgcgcgacggcgttgctcttccatagcggcttcaaaaccggcttcatcgactttgatgttgcgctcacggcagacgtccgccgttagatcgaccgggaaaccataagtatcatacagacggaaagcggtttcgccgtccagggtgtcgccctgcaatttcgccagttcttcatccagcagcgccagaccgcgctccagcgtacgggcgaactgctcttcttccgttttcagaacctgttcgacctgcgcctgctgacgtttcaactcttcgcctgcggagcccattacctcaatcagcggcccaaccagcttgtagaagaaggtctctttcgcgcccagcatgttgccgtgacgaaccgcgcgacgaataatgcgacgcagcacatagccacggttttcattcgacggcagcacgccatcggcaaccaggaatgcgcaagaacggatgtggtcggcgataacgcgcagcgatttattacccagatcggtggcgccagtgactttcgctaccgcttcaatcaacgtgcggaacaggtcgatgtcatagttagagttaacgtgttgcagtaccgcggcaatacgctccagccccataccggtatctacagacggtttcggcaatggttccatcgtcccgtcagcctgacggttgaactgcataaagacgatgttccagatctcaatatagcgatcgccgtcttcttccgggcttcccggagggccgccccagatgtggtcgccatgatcgtagaagatttcggtgcacggaccgcagggaccggtgtcgcccatctgccagaagttatccgatgcgtatggcgcgcctttattgtcgccgatacggataatacgctcgcgcgggatgccgacttctttttcccagatctcataggcttcgtcgtcggtttcatagacggtgacccataaacgctcttttggcagagcaaaccagttttcaccggtcagtaattcccatgcgaactgaatggcgtcgtgtttgaagtaatcgccgaagctgaagttgcccagcatttcgaagaaagtatggtgacgtgcagtgtatccgacgttttccagatcgttgtgtttacctcccgcgcgtacgcaacgctgggaagtggttgcacgggaataattacgtttatcgagcccaaggaaaacatccttgaactggttcatcccggcattggtaaacaacagagtggggtcattgttaggcaccagggaactgctggcaactacctgatgccctttactatggaaaaagtcgagaaacgcctgacggatctcagcggtgctcttgctcataattatcctgaaatcaagctacacttcatccttcaggccgcctctgcgttggctgcgagtttcccggtcacgcgttcccgaggctcacttgccgctttgatgcggcttgaatgattttgtgtatttaaggaatattcgtcgcagacgctgttcgccgttaagcaacccgcgtccagacggaaaaagtgggaataagataagttttctttaccgggaagtaaaatcccgtatgcgctcaatctgcaaaatttcgccatatttgctggatattgtccatcagatacccgcgatagagcaaaaagcgctgtaccttaaccttttctgaaaagtttgaagggagcggctcgccatatttgcgaacggcctgttcacgtgccatttcactccagtcaatttcacattctcgcatcgctttttcagtcgattcacgggaaatgcctttctgattcaactcctggcgaatacgcgccgggccatagcctttgcggctacgactggcgataaagcgcatcacgaagcgctcgtcatcaagatagtgatgttcgtggcaccaggcgatcacgcgttcataatcgtctgccgtcgcatcaatctcttccggcccatttttgcccatcaccggcgcggagagtttacgccgtaattcctgctcgctgtgatcgcggacagcaagaatacgtaccgcacgatcaaggagacgagcataagcgggacggcgcgatgtgggttcactcataaaaaaccttaacagggagaaatgccaaaagggccgcataaatgcagcccttgatggtaatttaacgttttgctgaatggcggcttcgttttgcccgccccaccatcacctgatgattaaaaatcttcgttggtttctgcaacgccttcgctatcgtcaacggcgaaatcgggcgtggcattctgattactcaacagtaattcacgaacccttttctcgatctctttcgctgtcgccgggttctctttcagccaggtagtcgcgttcgctttaccctggccaatcttctcgccgttgtagctgtaccatgcgcccgctttctcgatcagcttctctttcacgcccaggtcaaccagttcgccatagaagttgatgccttcaccgtagaggatctggaactcggcctgcttaaacggcgcggcgattttgtttttcaccactttcacacgcgtttcgctacccacgacattatcgccctctttcaccgcgccaatacgacggatatcaagacgaacagaggcgtagaatttcagcgcgttaccgccggtggtggtttccgggttaccgaacatcacgccaatcttcatacggatctggttgatgaaaatcaacagcgtgttggactgtttcaggttccccgccagcttacgcatcgcctggctcatcatacgcgccgcgaggcccatgtgagagtcgccgatttcgccttcgatttccgctttcggcgttagcgccgctacggagtcgaccacaatgacgtccaccgcgcctgaacgcgccagcgcgtcacagatttccagcgcctgctcgccggtatccggctgagagcagagcaggttatcgatatcgacgcccagcttgcgtgcgtaaacagggtcaagcgcgtgttccgcatcgataaacgcacaggttttaccttcacgctgcgcagcggcaatcacctgcagcgtcagggtcgttttaccggaagattccggcccgtaaatttcgacgatacgccccatcggcagaccgcccgcaccgagtgcgatgtccagtgaaagcgaaccggtggagatagtttccacatccatagaacggtcttcacccagacgcatgatggagcctttaccaaattgcttttcaatttggcccagtgctgccgccaacgctttctgtttgttttcgtcgatagccattattactcctgtcatgcaacttggtattgaaccggatagtgaattcgtactgttgaagcaattatactgtatgctcatacagtatcaagtgttttgtagaaattgttgccacagggtttgtagcgcgtatgtcgtcgcctgtcgacgcaccgattcacggtcgccgctgaagcattcccgacgcgtaatcccttctccactgacgctggcgaaagcaaaccacaccgtaccaaccggcttttcttcactgccgccatccggcccggcaatcccgctaatagcgacagcaaaatcggcgcgagcggccttcagcgccccgatcgccatttcgaccactacgggttcgctgaccgcgccatgctgcgccagagtctcttcacgcacgccaatcatctgcgctttggcttcattactataggtgacaaagccgcgttcaaaccaggcggaacttccggcgatgtcggtaatggctttcgccagccagccgccggtacaggactctgctgtcgttacggtcgccccgcgcgcttttaacgccagcccgacctgctcgctaagccgcatcagttcactgtcagtcatcatgacctctgtcagttagaaatcctgccgcacaagatagcactttctcaccagagatggggacgagctgtcgattttacgagtcggattccgaaaaaatgccagcaggttatttatgcagaatgaaagaggtagcacttgactaaatagcagtaccatgtcgctaaatttacacgtacggagagaaagcaaggatgtcactcaaaaaaacggaaagcacacagcacaaactgaaacaaacctgtcaactacggctgtggttaattgtgggtggagtatgttcattaggaatgggagtactgaatatattgtcgtcaggctattttgaaccgtatgacggcggtcaaattatcttaggcctgggatgtctgggatatagtctggcactatcaaagaagatatcccacttgcaggcagagaatcagcccaaaaagccataataatagcggagggggtgctcccctccctaagcgtaaattagcgcacccgcgccagcgctaccgcctggcccagttgccaaaccgccatcgcataatgcgtgctgtggttatatcgggtaattgtgtagaagttcggcaggccgtaccagtactggtatcccgtaccgatatccagacgcagcaggctggcttcctgatgattgcccaacgattgctgcggcgttaagcctgcggcggcaagctgagagatgctgtattttgttttgaaaccattcgccaacccaggcgcctgaccactcgccggcaccgcaaccatatcgcctttcacccaaccatgcgccttgaaatagttcgccacgctgccgatggcatctaccggatcccacaagttaatgtgcccatcaccattgaaatcgaccgcatattctttataggaagatggcataaactggccgtagcccatcgcgcccgcaaaggaacctttcagattgagcggatcgtcttgctcatcgcgcgccatgagcaggaaggtttccagctcgccggagaaatattccgcccggcgcggatagttaaatgacagcgtcgccagcgcgtccagaatccgcgttttccccatgatacgtccccagcgggtttccacgccgatgatgcccacgatgatctccggcggtacgccgtatacctgccaggcgcggttcagcgcgtcttcatactgattccagaacgcgacgccgttttgcacgttatccggcgtaataaattgtttgcggtagcgcaaccaggcgccatttggtccggcgggcggctgagtggtcggcgcttgtctgtccatcagacgcaggacgtaatccagtcttttagactgcgagaggatctcttgcaactgctgacggtcgaaaccgtgtttactgaccattttatcaatgaactgctgcgcattagggttgttggcgaagtcgccgcccatttgcatgacgttatgctgcggctcaagcagaaagccgccggaaggcgtgcccgtcgtcgcttgagtctcggaagattttggcgtgctgctacaggcagcaagcaatacgcaaagtggaagtaacgctacataacgacgcttgaacatgagacatccattaaacaaattcagccagggagaagtatggtaaagcatcccccgccgcacaaggaagcggcacaagagaataaatcacctttctcctcttttcagtttgtatacgctccctcactcccacaatctttcaatttaaaatatttttcttttattttgcgatcacaataacacttttaaatctttcaacatgattacaatgaacaggaaattagcaagaaaactaaaaaccctacaggagagaacaatgatcgaaaccattacacatggtgcggagtggttcatcgggttattccagaaaggcggagaggtgtttaccggtatggtgacaggtattcttccgctactgataagcctgctggttatcatgaatgcgctcatcaattttatcggccagcagcgtattgagcgttttgcccaacgttgtgccggaaatccgctatctcgttacctgcttttaccgtgtatcgggacatttgttttttgtaatccgatgaccctgagtttgggacgctttatgccggagaagtacaagccgagctattacgcggcggcctcctatagctgtcactccatgaacggtctgtttccgcatatcaatcccggcgaactgtttgtttatctggggatcgccagcggactcaccacgttagggcttcctctcggcccgctcgcggtgagctatctgctggtaggtctggtgacgaacttcttccgcggttgggtcaccgatctcaccaccgctatttttgagaaaaaaatggggattcaacttgagcagaaagttcatctgacaggagcggtatcatgacacgggttcgcattgagaaaggcgccggcggctggggcggcccgcttgaactggacgttacgccagacaaaaagatcgtctatatcacagccggtacgcgcccggcgatcgtcgacaaactggcgcaactaacaggctggcaagcggtggacggctttaaagaaggcgaaccgccggaagcggagatcggcgcggccattatcgactgcggcggtacgctgcgctgcggtatctatccgaaacgccggattccaaccattaatattcactcgacgggtaagtccggcccactggcgcagtatattgttgaggatatttatgtctccggcgtaaaagaagaaaacattactcttgtcggcgaaacgcctgccagtccccagcctgccaaaacgacattaggacgtgactacgacaccagcaaaaaaatcaccgagcagagcgacgggctgctggcaaaagtcggtatgggaatgggctccgccgtggcggtactgttccagtccggtcgcgacaccattgatacggtcctgaaaacaatcctgccgtttatggcgttcgtttcggcgctgatcggcatcattatggcctcaggtcttggcgactggatcgcccacggcctggcgccattagccagccatccactggggctggtgacgctggcattgatctgctcgttcccgctgctgtcgccctttctcggccctggcgcggttatcgctcaggtcattggcgtcctgatcggcgttcagataggcctgggcaatatccccccgcatctggcgcttcccgccctgttcgcgattaacgcgcaggcggcctgcgactttatcccggtcggcctgtcgctggcggaagcgaaacaagacaccgttcgcgtcggcgtaccttctgtgctggtcggacgcttcctgactggcgcgcccacggtacttatcgcctggtttgtttccggctttatctatcaataagaggttcagacatgagcgtgatttatcaaaccaccatcacccgtatcggccagagcgcgaaggaagcgctcggcgaacagatgctgattacgtttcgggaaggcgcgccggcggatatcgaagaattttgcttcatccattgtcatggcgaactgaccggcgcgctgcagcctggcgcgcggtgtgaattgggtcaacattgctatccggtcacggcggtcggcagcgtagccgagcaaaacctgcgtgaactggggcatatcactttgcgcttcgatggtctgcgtgaagcggaatttcccggcaccgtacacgttgcggggcctgtaccggacgatatcgcgccgggctgtattttgacgtttgtcgcttaaggagaaaaaacatgaatcaagttgccgttgtcattggcggaggccagaccctgggggcattcctttgccgtgggcttgcagaagaaggataccgcgtggcggtcgttgatattcaaagcgataaagccgcgaatgtcgcccaggaaattaacgccgattttggcgaaggtatggcgtacggttttggcgccgacgccaccagcgagcagagcgtgctggcgctttcccgcggcgtagacgagattttcgggcgcgtcgatctgctggtttacagcgcgggtatcgccaaagcggcgtttatcagcgatttccagttgggcgattttgaccgctcgctacaggtgaatctggtgggctatttcctctgcgcccgtgagttttcccgcctgatgatccgcgacggcattcaggggcgcattattcagattaactctaaatccggcaaagtgggcagtaaacacaactccggctacagcgcggcgaaattcggcggcgtggggttaacccagtctctggcgctggatctggcggaatacggcattaccgtacactcgttgatgctcggcaacctgttgaaatcgccgatgttccagtcactgctgccgcaatacgccactaaactgggcattaagcccgatgaggtggaacagtattacattgataaagtaccgctcaaacgcgggtgtgattatcaggatgtgctgaacatgctgttattttatgccagcccgaaagcgtcttattgcaccgggcagtcgatcaacgtaaccggcggtcaagtgatgttctgaccgtgaattgccggatggcgccgtaggccggataagacggttacgcgccatcaggcaaaacaacaggagcacattatggtttccactctgattaccgtcgccgttatcgcctggtgtgcgcagctggcgctgggcggctggcagatttcccgctttaatcgggctttcgataaacttagccaacaggggcgggtcggcgtcgggcgctccggcgggcgttttaagccccgggtggtggttgccgtggcgctggacgaacagcagcgggtgacggacactttattgatgaaaggccttacggtattcgccagaccggttaaaattgccgcaatgcaaggaaaacatttgcatgaattacagcctgatgtgatctttccccatgattcgctcgcgcagaatgcactatcattggcgcttaaactgaaacatgggtaatttcgttgtgaatgcgtatagcttgcgaaattatcattttgcaaccaataccctaaataattcgagttgcaggaaggcggcgacgcagcgaatcccaggagcgtacatcagtacgtgaccggggtgagcgaggaaagccaacgcacatgcagcgtgaagtatgacgggtaaatacataagtcagggtaatcacgcctatgaaacctcgtcagcgtcaggccgcgattctggagcacctgcaaaaacagggaaaatgctcggttgaagaactggcccagtactttgacacgacaggcaccactatccgtaaagatctggtcattctggaaaatgccggaaccgtcatccgcacctatggcggcgtggtgttgaataaagaagagtccgatccgcctattgatcacaaaacgcttatcaacacccacaaaaaagcgctgatagccgcagccgctgtgaaatatatccatgatggcgattccattattctggacgccggaagtaccgtgttacagatggtgccgttgctttcgcgttttagcaacatcacggtgatgaccaacagcctccatattgttaacgcgctatcggaactggacaacgaacaaactatcctgatgcccggcggcaccttccgtaaaaaatcggcgtcgtttcacggtcaactggcggaaaacgcctttgagcaattcagctttgataaacttttcatgggaactgacggtattgacctgaatgtcggtgtgaccacgttcaatgaggtttacaccgtcagtaacgcaatgtgcaatgcagcacgcgaggtgattctgatggcggactcctcaaaatttggtcgtaaaagccccaatgtggtgtgcagtctggaaaccgtcgacaaactgatcacggacgcggggatcgatccggcatttcgtcaggcgctggaagcaaaagggattgaagtaatcataaccggagaaagcaatgagtgatgcactactaaacgcgggccgtcagaccttaatgctggagctacaggaagccagccgtctgccggagcgtctgggcgatgattttgtccgcgccgccaatatcattattcactgtgaaggcaaagtgatcgtttccggtattggtaaatcaggtcatattggtaaaaaaatcgccgcgacgcttgccagtaccggtactcccgctttttttgttcatccggcggaagcactgcatggcgatctggggatgattgaaagccgcgacgtgatgttatttatctcctattccggcggcgcaaaagaactcgacctcatcatcccgcgtctggaagataaatccgtcgcgctgctggcgatgaccggtaaacttcactctccgctggggcgagcggcaaaagccgttctggatatttccgtcgagcgtgaagcctgcccgatgcatctggcgccgacatccagtaccgtcaatacgctgatgatgggcgatgcgctggcgatggcggtcatgcaggcgcgcggttttaacgaagaagatttcgcccgttcgcatccggctggcgcactgggcgcgcgtttgctcaataatgtgcatcacctgatgcgccagggcgatgcaataccgcaggtgatgcttgccaccagcgtgatggatgccatgctggaacttagccgtaccgggctggggctggtggcggtttgcgatgagcaacatgttgtgaaaggcgtctttaccgacggcgacctgcgtcgctggctggtgggcggcggcgcgctcaccacgccggtaagcgaagccatgacgcccaacggtattacgctccaggcgaaaagccgcgccattgacgccaaagagctcctgatgaaacgcaaaattaccgccgcgccagtggtcgatgaaaacggcaaactcaccggcgccattaacctgcaggatttctaccaggcggggattatctaatccttcagtcccagacgcttcgccagccgatgcaggttggcgacgtcggtttccagcgcccgcgcgctggccgcccagttatgattattttgcgccagcgcctggcgaatcatctctcgctggaagttctccgtcgattcgcgcaaattgcggcaagtcggcagcgccagaaagctttccgcaggcggcgcgggtaaaacgtcctctgacaaggcaaaatgctgtgcctccagtatcacctcatcccctgcccgggtcgctctcgccagtacaaccgcacggtgaatggcatgttccagctcccggacgttgcccggccagccatagttgagcaaatggcgacgtgcgccgggactcagtaccacgcgggacagccccagccgcagtcggcactgctcgcaaaaatagcccgccagcagcaccacatcatcgccgcgctcgcgcagcggcggcacaaagagcgggaaaacgctcaggcgatggaacagatcggcgcgaaaacgccctgccagcacctcttcacgcaggtcacggttggtcgccgccaacacccgcacgtccacgcgcaggctacgatcgtcgccgacgcgctgaatatcgccatactgcaacacgcgaagtagcttagcctgtagcgccagcgacagttcgccaatctcatccagaaacagcgtaccgttatccgccatttcgaacttaccgctacgattactgatagccccggtaaaagccccttttacatgaccaaacaactcgctctccgccacgctttccggcagcgcggcgcagttgagatagaccagcggattaaccgctctgggggagccctggtgaatagctttcgccaccagctctttaccggtccccgtttcaccgccgatcagcacgttaagatcggagcccgccacaatctcgatctcttttttcaactgcgtcatcgccggcgacaggccgatcatgtgcgtctcttttatcggttcaaacacgcctgacgaccccggcagcatgttctggctttccagttgttcaattaacagcgcattactcaatgccccggcggccagcgcggcgacaagccgtagttcttcatcgctaaatacctcgaactgctccggcgtcatagcatcaagggtcagcgcaccgatgaggttctgtccggcaaacagcggcagaccaacacaggcgtggactttcaggctttcctgtccgggaattaacccgtcatacggatcgggtaaatcgctatcagccggaaaacgcaccacgtcccccgcgcgggcgatggcttccaggcgcggatgcccttccagggtaaaacgtctgccgaggacgtcctgcgccaggccatcaatcgccagtggaataaattgtcgtgattcatagcgcagcagcgccgaggcgtcgcacgccagcacctgacgcagcgtagtaatcagccgctgaaaacgatcctgatgcccaatgccgcgttgtaactcaatggcgatgcccgccaatacctccacggaaaaactcatggttacctcattgtcattttgacaacctatagtgtcatattgacagcatcatttatagtctttttgactacatcaaaaatacaaaacaaatataactcaatacaaatcaataagatgaaaagttggcacactagctgcaataagcaaaacaactttttgtaaacgttgaatgaattgaggtggttatgtctattctggttaaaaataatattcattgggttggccagcgcgactgggaagtacgtgattttcacggcactgaatacaaaacgctgcgcggcagcagctataacagctatctcattcgtgaagaaaagaatgtgctgatcgataccgtcgatcataagtttagccgtgagtttgtgcaaaacctgcgcagtgaaatcgacctcgcggatatcgactacatcatcattaaccatgccgaagaagaccatgcaggcgcgctgaccgaactgatggcgcatatcccggacacgcctatctactgtaccgccaacgccattgactctatcaacggccatcaccatcacccggaatggaattttaaggtggtgaaaaccggcgatacgctggatatcggcaacggcaagcagttgatcttcgtggaaacgccgatgctgcactggccggacagcatgatgacctatatgaccggcgacgcggtgttattcagcaacgacgcctttggtcagcactactgcgacgagcgcctgttcaatgatgaagtggaccaaactgaactgtttgaacaatgccagcgctactacgccaatatcctgacgccgttcagccgtctggtaacgccaaaaattaccgaaatcctcggcttcaacctgccggtggatatgattgccacctcacacggcgtggtatggcgcgacaacccaacgcaaatcgtggaactgtatctgaaatgggcgacagattatcaggaagatcgtatcactattttctacgataccatgtcgaacaatactcgcatgatggcggatgccatcgcgcagggtatcaacgaagtggaccccaacgtggcggtcaaaatctttaacgtcgcccgcagcgataaaaatgaaatattgaccaacgtcttccgttcgaaaggcgtgctggtcggcacttctaccatgaacaacgtgatgatgccgaaaatcgctggtctggtggaagagatgaccggcctgcgctttcgcaacaaacgcgccagcgccttcggttctcatggctggagcggcggcgcggtggatcgactgtccacgcgcttacaggatgccggttttgaaatgtccctgagtctgaaagcgaaatggcgtccggatctggatgcgctggagttgtgccgtcagcacggtcgcgacatcgcgcgtcagtgggcgcttgctccgctgccggaaaccacacagcaaatcgcgccagtcgaagaaaccataacctgcaccgccgcagacctcggccccaaaatgcaatgcagcgtatgccagtggatttacgaccctgcgctgggcgagccgttgcaggatgtcgcgccgggtacgccgtggaacgacgtgccggataacttcctgtgcccggaatgttcattaggtaaagacgtgttcgacgtactggcgacggaggcaaaatgagtcgggggatcatcattattgggtcgggcttcgccgcccgtcagctcgtcaaaaatattcgtaaacaagatgcgcatgtgccgttaaccctgattgcggcggacagcatggatgagtacaacaagcccgatctcagccacgttatcagccagtcgcagcgcgccgatgatctcacccgccagttagcgggggaatttgctgaacagtttaatctgcgacggttcccgcatacctgggttgctgacattgatgccgatgcccatgtggtgaaaagtcaggataagcagtggcagtacgacaagctggtactggcgaccggagcgacagcctttgtgccgccgattgcaggacgtgagttaatgcttactttgaatagccagcaggagtaccgcgcctgtgagacacaactgcgcgacgcgcagcgagtgctgattgtcggcggcggtctcattggcagtgaattagcgatggatttctgccgcgccgggaaaacggtaacgctgatggataacgccgccagccttctcgcctcactgatgccaccggaagtgagcagtcgcttacagcatcacctgaccgatatgggggtgcatctgctgctgaaatcgcagttgcaaaaactggagaaaaccgaagccggtatccgcgctacgctggtaagccagcatagtattgaggtcgatgcggtgattgccgccaccggcttacgcccggaaaccgctctggcgcgccgcgccggagtagccgtcaaccgcggcgtctgcgtggatagctatctacagaccagtcacccggatatttatgcgatcggcgattgcgcggagatcaacggtcaggtgctgcccttcctgcaaccgatccagttaagcgcgatgtacctggcgaaaaatctgctcggcggcaacgcgccgctgaagctaccggcgatgctggtcaaagtcaaaacgccggaactgccgctgcatctggcgggagaaactcagcgccgcgatttgagctggcatattaccgcagaatctgacggtatgattgccaaaggcatgagcggagaaggccaactacgcgcctttgtggtgagtgaagaccgcatgaaagaggcctttgcactgctaaaaacgttgtcggtataagcctgtgatgccggatggcgccgcttcgcgtcttatccggcctacgagtgagcatctgtttacaggccggataaggcgcagccgccatccgtcgccctacacttcacttaacgctcgcgctgcggcaatcacgccctgtccaaacgacagcccgccgtcgcccgctggtaaccgctgcggaaataacaatttaaaatcagaaagataaaaggcaagacgcgcgcgaagtaagcggttgtgtatcaccccgccgctgaagaccagagtggttatcccccgcgccgtagcctgctggcgcattagcgtggcaaacccgcacgccagcgcatcatgaaaagcccaggcgcgttgcgcaggcgtggcctgccagttcaaccattgccgccagaaaacggcgacgtccagttgagcgccgttaagcggcatcgttaccggatgctcaacgttagcgcattgagaggccagcgcctccagcgcgcaggcggcctcgccctcatagctaagcgatgctggcgcgcagcgaagcgcggcagccaccgcgtcaaacaaccgcccgcaggaagaggccaacggggcattgacgccgcgctcaatggcgcgcgccaggacattccagttttgctgttgcagccccgctgtctccgggtaatcctgccagtccggcacaaagcgcaggcactgcgccaacagattacgccacggatgtttggcagccagatcgcctcccggcagcgccacggcgggtaaaccacctaaatgttcgcattcgcgataattgacccgcaaacattctccgccccatagcgcgccattctcacccatgccgataccgtctaccgtcagggcaatcacctctccgccgtccagcggccaaccatgctcggccaggcaagccgccgcatgggcatgatggtgtaacaccgtctctgtcggcagacgcatctcactggcccactgactggaaacatagcccggatgcgcatcacagacgatacgctctggcgtaaaatcgtagattgactggatcagacgcaatgcctcgcgccactgcgcctggataccgtcatcgctgagatcgcctaaatgttggctgacaaccgcctgtgcgccgcgtaccagacagaacgtgtttttcagatccgcgcccagacaaagtatcggcggcacatcgcgaaatccgggcggcaacgcaatcgcgtccggcacgtatccccgcgaacgacgcagcatttcgccgctgtcgcgtacgacagagtcgtccatgcgctgtacaatgtcgcgattgtgcaacagaaaaccatcggcaatatcgtgtaaatcgtccagcgcctgttcgttggtgatggcgggcggtttgccgctcaggttgccggatgtcatcaccagcgggtaattgagctcctgcaacaagaggtgttgcaatgggttggctggcagcatcacacccacctccgtaagtcctggcgcgatgccctcactcagcgaaggtacatactgcttatccaccagtacaatcggggccgctggcgtggtcagcagcgaacgcgccgcgctcggcagcgtttgcgccgtgggcaacatcaccgccaatggtttcgccggacgatgtttacgcgcccgcagcatcgccactgcgttagcgttgcgcgcatcgcaggccagatgaaaaccacccagccctttaacggcaataatgcctccggcgttcagttgggcgaccgccgcctgcaaagccgcctctttttccgctcgttcatgttggctccgccactcaagatgcggcccgcatgacggacaggcaacgggctgggcatgaaaacggcgatcgtacggatcgcggtattcgctgtcgcattccggacacaagggaaacgccgccatcaccgtaaatggccggtcatagggcatagcgcgaataatggtgaagcgtggtccgcagtgggtgcaattgatgaaaggataacggtagcgccgctcgcctggggtattcatctcggcaagacatgccgggcaggtcgccgcatccggcacgatttgcgtgttcatcgaaccgcctgcgctctgacgaatggtgaaatccgtcggcgcgcgctcccataccaacgacgcgtgttcaacgctgtcaatgcgcgccagcggcgggcaatcctgatagagcgcggcaataaattgcgacggctcttccagcagccgaacgacgacgccgtcgccgtcattacacacgtcgccgtgtaatcgcaactgctgcgccagctgccagacaaaaggacgaaaaccgacgccctgtactttgccccgaatgcgtagctgtacgccggaaggtgtgtctatcgccatcttattttcccgccatcatcgaacccggatgcctgatggcgcgacgcttatcaggcctacaaccgcacggaccgtagaccggataaggcattgatgccgccatccggcaatgctttgtggcgtattctacgcgcaatcgcagaaatcagaaaagcagcgatgccgttgaatccagcgccgcgcgacggcgtttttccgcgctcagctgttcaagcttattgcggtccacgcagattagggcgtgcgttgggcaagcggccatacaggccggaccggcttcacggtggtgacacagatcgcacttgttggcttcggctttttcggcacgcacgttcagccccgcgccgctattgcgaaccaccggacgtaccaccacttccatggcgccgtaaggacatgccactacgcaagttttacagccaatgcagcgttcctgcatcacatgaacaaagcctttgtcacggctgatggcgccattcgggcaaacgttggcgcacggcgcgtcttcacactggcgacacagcgttgccgtggaaacgttcacgcctttgatgacatggatacgaggtaaaaaggtttcaggggtcagcgatgcgcaatcctgattttcctgatgggatacgacgcaagccacttcacaggtacggcaaccaatgcacttactcgcgtctgcaatgatgaaacggttcatcaaattctccagcaataacagatgatgtgccgatatatacacgaatcgtgccaatttttatttcattgttatttaagaatattatttctattttcgtgagcatttacgtgtcatcgtcacaagtgtcgatgacacgtaatgtcgccagtggtggtcaagatttgcagtgatagccagccaactctgcaccgcaactggcatcaatcctgattaacgcctggcaatacgttaccgcgtattaaacagcgctgcgtaagggaaagatcgtccgtttgcggattccttccggcaataggtttgataattaatttacgaccaggatagtgattaaaacgggtcagcgccggataactcaaccggccaaaccagccgtgtacgcgctgccagcgggcgtccttcacctgatataaattggttatccagtagcctgagtcaaattgcatatccaacagttgcgtgcgcccattgccctgtaaatcaagcaaatcatcaacgccagtatcggtcgcggtataaaacccccacggttcaaagacgcaggggcggccattcttgagaaaggtgaaaatgatgtattgcgcgctcggcgccaggcccaacccaggattgcccaaccagataaccagatcctgaatgccgttacgatcgaggtcagcgcgataaaattgcgcattacccgccaaattaatcagccttccaaccgggacaacccacgaattaccggctctgtcttttccgctaatccgccattcgttatcttttttcggctccggcagtagcgtcacgccactgactccgacctggcgaaagtgccaggtctggtcgggcgatacagaataaggcagggtcaacagcggcttcagcgcacgcttttgcgcatattcaccgtcgctcatcggcaggtaaccgacaacaccggtggccagtgcgcgtgcggcgaggcagagaaatagcagtccgctccatacgataatcttcacgtccttcttacaacctttgccgtgtaacacaaattctccctaaatatgtgcgcattttacgcctccggcgcttccagcgcggcaaatccgccgtttccctgccagccttccaggcgctgatagacgatgtttaccgcgtccttaatcggttgagtcatcggataataaaacccgacgatatccggctggataccaacaaaaatcacctccccgacatcctctttcagctgatcgataaggtagttgagcggcatattgtgggtggtcatcataaacatttcggcgatatcatccggatcgatgatgcggatctcgcccggattaagtcccatatcggtggcgtcgacaatcaacagacgctgcgggcgcagttcgcgaatcgccacaatgtcgttttccggcgcgctgccgccatcgatgacaacccagttgcccttcggctgcgccgcgcacatttccgccagtaacgggcctgcgccgtcgtcgcccatcatgctgttgccgacacagagtaaaacgtcagtcacgaagcctcctcaccatcagatagatggcgctttcctgatgaatgtcatacagcatactgagcatcagtttgctccattcttgctgctgcggggtctgcgcggcgcgcgcctcatcaaacgcgcgcgccagcatttgaacatggttgaaatcgatgacgatctcgccatacttcggcacgccttccattttacgccgggcatcgctaccggcttccagggtggcgatccacgccagatactcatcccatgggcaggtgagtgcggcctccagacaatcgataacccccaggtggtgaccaatcgccaggctgtaatagacaacctgctgcgcctcggcaggcgtcgcatcgttctcatcaataaacttacggctcagttgactgaacaccacctgttcgctcatcggatacgcgcctcttcaacaacatgattgagatgggtgacaatttcggttaaacgcggatcgttttccgcttccagccaacgcgccacttgctgctcgccctgccccaactgtgtcaggtaatcatcggcgatctgacgaccatagcgataacccgccagccggcgcgccgcgcgatccaccttcacgcgcagcggctgcaccatatccggatgcaggatctctgcgggctgatcgtccagctcacccggcgcgcgggcgtggattttctgctccagcaggccaagcgccattgcaaatccgtacagcgtggcggcaggcgttggcgggcaccccggaatgtacacatccaccgggacgattttgtcggtaccgccccagacgcagtagagatcatggaagatgccgccgctgttgccgcaggcgccgtaagagatacaaattttcgggtccggcgccgactgccaggcgcgcagcgccggagagcgcatggcgcgggtcaccgcgccggtaaacagcagaatatcggcatgacgcggcgacggtactactttgatgccgaaacgctcggcatcaaacagcggcgaaagcgtcgcaaagatttcgatttcacagccgttacagccgccgcagtccacgcggtaaacgtatgccgaacgcttaatatttttcagtaaagacgccttcatgctggcgatggattcatccaccgtcatcggtaccggaatgccgttggcgtcacgcgggcctaataaattgctcattagctgacctctttcatatggcgagtcagttcaatacggtcggacggcaccaggcatttctgacgcttacagtccgggcaggtctcaaagctttcgcggtggttttccgcgcggctgtcgccgttgtgcgcaagcagcgcaatggcgtagtcgatctctttctgtaccgcgaaaggacgattgcacacgcggcagttgcacagcgcaaagcgggactgttgcaggaaatcttctttcttccacaccgccagttcgtactcttgcgacagtttaatcgccgccgtcgggcacacctcttcgcagcgaccgcagaagatacaacggccaagattgaactgccacgccagctcattggtcgcgagatcggtttccaccgtcagcgcgttcgacgggcaggcattaacgcaggcggcgcagccgatgcactgctgcggattatgttccggcttgccgcggaagtttttatcaaccgcaatcggctccagcggataagacgaggtcgccgtgccggttttgataacttttttgataaaggtaaacatggcgattccttatttcagcggcgagtttttacgctcaatgctgtagcgctcaagttctttgtacggcacgactttgctcttcttcttacgcacatcgaccacggtcatccggtcggtacaggagtagcacgggtcgaggctgccgataatcagcggcgcgtcggagacggtgttgccgcgcagcatatagcgcagcgtcggccagttggcgtaggtcgccgcacggcagcgccagcggtacagcttctggttgtcgccggtcatgctccagtggatatcgtcaccacgcggcgcttcagcgaagccgagcgcaaaacggtgcggaatataggtaaagccttccaccatcagcgggccgcccggcagattatccagaccgaaatcgatcatattcagcgaggtgtaaacttcgttgatacggactttcagacgagaaatcacatcgcagccctgctcgctgtgcacttccatcggcagcaggccatagcccacaaacgggtggtcggcgcgggtgtcgcgggcgtgaccgctggcgcgcaccatcgggccgacattactgaagtcacgggcaatttccgggtccagacggccgatacccacggtacgctgttccatattcggcgtgctcagcagcatgtccaccagctcctgcacgtcacgacgcatctgctgcgccagttgacgggtctggatcatgtcctctttgagcagatcgcggcgaatcccgccgatcaggttcagtccgtaagttttgcgcgcgccggtaaggatctctgccattttcatggaggtttcacgcacgcggaagaactgcataaagccggagtcaaaaccggtaaagtggcaggcgaggcctaggttcagcaggtgcgagtgcagacgctccacttccagcagaatggcgcggatcatctgcgcacgctccggcacctgaatgcccatcgcgttttccacggaagtggtgtaggcagtgctgtgcgcgaagccgcagataccacacacgcgatccgacaggaaggtgacttcgttataacccatgcgggtttccgccagtttttccataccacggtggacgtagaacaggcggtagtcggcgtcgataatgttttcgccatcgacgaacagacggaagtggcccggttcatcggaggtgacatgcagcgggccaatcggcaccacgttatttttcttgtcacccagctcgttaatgaactcgtaggtttccgcatcggtggtcggcgccgggcgctgacgataatccatactgtctttacgcagcggatagagttcatccggccagtcgtccggcagcaccagacggcgctcgtccggcagaccgaccgggattaaaccgtacatgtcgcgtacttcgcgctcaccccacacggcagccggcacgcgcggcgtaacggatgggaattccagcttattggcatccacttcaacgcgaacggtaatccagcacttcgtgccctgctccatcgacagcacgtaataaacggcatagtggccgcacaactggcgttcgtcattaccgaacagcaccgacagccacccaccctgctggtagtaaagaaactccaccacttccggcagatagtttactttcaccgtaatagtcagctgatctttggtctgccaggcttcgtccagcacgacgcccggaaacgcctggtgcagcgccgcaaggtattgttgacctaatttttcttcagacatgctcaaactctcttaaatcacgccgccagcaaggagacgaaggctaaaaacgcaaacccaaaaccggcccaggtcacgcgtgaagtggcgcaaaaacgcagtcgcgccatgctgttttcaaacagggcgatcaccagtacgccaacaatcagcttgacgacggcaatcaccagcgccagcagcagtccgcctgcgctgaaggtttccatctgtccccacggcagaaacacgccgacgaacatttgcaacaccaccagttgtttaaggctgatgccccatttcaacaccgcaaagccgctaccgctgtattcggtcaacggcccttcctgcaactcctgctccgcttccgccaggtcgaacggcagcttgcccatttcgataaaggtggcgaaggcgcaggcgcacagcgccagaatcagcggaatactgcgcgcgacaggccagtgataaatggtatcggcgatattgctgatatgagttgaacccgccacctgcgcggcgacccacagacccagcagcagaatcggctccaccagcacgccgagcatcgcttcacggctggcgccgatcgcggtgaacgggctgccggtatccaggcctgcaatagagaagaagaagcgcgcgatggcgaacaggtaaatcagggtgattaaatcacccagttgcggcaacggagatccaacggtgacgaccggcagcgcggtggcgatagtcagcatcacgccgaccatcacaaacggcgtcaggcgaaaaacccagccagaatcagcgggcgcaatactctgacgaccgagcagtttgataatgtcgcggtactcctgcaacacgcccggccctcggcgattgtgtagacgggcgcgcaccacgcgagtaataccggacagcaatggcgcaacggcaaatagcaccagcgcctgaattaacggataaaacacactcattttcaggctcctcgtgaaaccacaatcaccaccagcaccgccagctcaatcagcgccagacgacggaacagcaccgcggccgccgcgttctgccagcccggaatcaacgataccgggttgagccacttacgcagtttgagtaccggggcaaaggcctctttcaccggcatggcaaaaccgtgcgcggtaatcaccatcgactgctcatggtcgtagccgcacacccaggccgcgccgcgagaacgcgacggcagacggttgcctttgaacatcgccataatgatgaacggcagtagcggacaggcgaccaacagcagcgtgatcatcggctgcgatacggtggtgtgcgcggtttccagcggcaacggtaccgcagtggaaatcatcggcaacagccacggcgcggcaaccccgcccagtacacagcaaatcgccaatgccaccacgctgacgcccatcaggatcggcgcgcagctggcattttcagcttccttcgtgcgcggcgcgccaaggaacgtcacgccatacactttcgccatacacatcaccgccagcgcgccggtaatcgccaggccaaccgccagcagcggtcctaacagacgaccaacaaacgcaccgctgttgcccagtttgaagaaggactgataaatcacccactcgccggcaaagccgttcagcggcggcagcgccgccatcgccatcagaccgaccagcatggcgatagaaataaccggcatccgtttaccaataccgcccagtttttcgatatcgcgatgaccggtacggaaccagatgctgcccgcgcccagaaacagcacgcttttgaacaggctatggttcagcaggtgatagagcccgccggtcagacccagcgcgatcagtaccggctgattgagagcaatcccggtaacgcctgcgcccagaccgagcaaaatgatgccgatattttccagcgtgtgataggccaacaggcgctgaatgttatgctccatcagcgcgtacagaccgccgacaaaggcggtgatcatccctagcaccaacagcgccacgccccaccacagcggcgcattgccgccaagcagagatagcgtgaggatacccagcaacccgattttcatcaccacggtcgagaacagcgcggcggcgggagcgctggcgttggcgtgcgcctgcggcacccaaccgtgtagcgggataatcccggccagcagaccaaaaccgataacgccgagcagccagatatcggagcccagcggcagttgctgagcgcgttgatccagcagccccagatccagcgtgccgtagcgctgccacaccagccaacaggcgattgccagcagcagcgtaccgagacggcccagcgcaaaccacagtttgccctctttgctaccgccggtgaggaacacggcgcagagcgccatgatttccgccatcaccaccatcgtccccagattactggcgaccacggcgcagacggctgccgccatcagcaggttgattaacagcccgttggcttttacctgtggatggcgatgccagtcgatattgaacaggctgacgaacagaccgcacagccccagcgtaatcagccagatagcattcagcggcgtaatttgcagcatgtggccggtaaacggcatcacgccgctaaccgtaacggcgctggtcagcgcggtgaaccccgcgcctgccgtacacaggctgccgaccgcgccgccgataccggcaatccagccgctcagcgctttatgaaacgaaaacagaaacgccagaacggcggcggcggcaaaccacgcgacgccgctagtaatcagtgaaagtgaactcattatgcatccccactctgagcctgctgaaacaaggtgagatcgccaaaatcggtattaaacgtcagctcacgtttacgtttgctggcgcgggcgatatccgtgttctccaccaggtgtagcgctttagtcgggcacatccgcacacaggccgggccttgctcgtcaaagctgcacaggtcgcatttcaccgcgatagcgcgtacgcccggcacccagtcgagcaacgtactgacgcgcgcaggcgctggcggcgcgggcggcgctttcggcgtattggcgttcgccggaatatgcagcggacggctgccggaaaactcaatagcgccaaacggacaggcaataccacacagtttgcagctcacgcacaggctttcattaagctggacagcgccgtcaacgcgattaatcgcgttaaccgggcataccgtggcgcatggcgcatcttcacagtggtgacaaagctgcggcgcagattctttttcattcagcatcactttcaggcgcggcattgactgcaggccatgctggcgatgcgtctctgaacaggcggcctcacaggtgtggcagccgatacagagagtggagtcagcaattacaaaacgattcaccaggcattcctcaggtgattgtcatttttgacgaaaacatgccgttgaaatgtcattttcgacacttatcgacacgcccatccccaaaacattcatgacatggcgcaacgccacatcgcgaatcaaagcgggcaacgcctcaggcttataccgccgggctgtgtccctttaccaattgacgcaaattaaccggcgagttggtttctacagcggtatagaggctgtcgtaaacgctggcgattttttccagatagtgctccagcacctgctcgcgatcgcggttgttaacccgttcatcaaccttgccgtcgatatcgagctgcgcctgtgcaatcaattgtttatcttcgccatctttggtttcaacgtagtactcaatggtgtggctgttaaaaccatccgccaacgcgacgtaaatacgaaagtgctcaaacaggacaaagcaaagatccctttccggcgcgcagctcattgcgtgatgcaggcgcgctttcgagagggtgatcccctgaaccagcgagttgcagtaaatatgccactggtcctgtaggcgacgatgccgttgcgcgatgtaatcggccttttcgcttatttcccaaatagtcatgtcaggttacccgtttaacagagatgcctgcgttaagcattttccatgccaatttttaacttattgtttttaatggcagacgcgcacagttactgccgtttcgacgcggtgacgacatgtcatttcgtcatcgtcgacattaacctgccaggggataaaaatattggcataaatattgctttacaggggcaaccactacgggaggcgatatgcacgaaatcaccctctgccaacgggcactggaattgattgaacaacaggcttcagcatacggtgcaaaacgtgtgacagccgtctggatcaaaattggcgcattttcttgcgtggaaaccagcgctctttccttttgttttgatctggtatgccgcggcacgatagcagaaggttgtaaactgcacctcgaagaacaggaagccgaatgctggtgtgagcattgtcaacaatatgtcacgttgttaacccaccgtgtacgtcgttgtccgcaatgtcatagcgatacgctgcgaattgtggccgatgacggcttacaaattcggcgcatagagattgatgaaactgaagattaatgccggatagacgctcgcgtcgccatccggcagaaagcctgtaacaagaaaaagatcaggagtaagcgatgtgtacgacttgcggttgcgctgaaggcaacctttatatagaaggcgatgaacataatccgcactcagcgtttcgtagcgcgccctttgccccagcggctcgcccggcgctgaatattaccggcattaaaacgcctgactttgccccaagtcagaccgcagaaggcgatctgcattacggccacggcgaagccggaacccacgcgcctggtatgagtcagcggcggatgcttgaggttgaaatcgacgtgctggacaaaaataatcgtctggctgagcgcaaccgcgcccgtttcgccgcccgccagcaactggtgctcaacctggtgtccagccccgggtccggtaaaaccaccttgctgactgaaacgctgatgaaattgaaagaccgtgtaccgtgcgcggtgattgaaggcgaccagcagacagtgaacgacgccgcccgcatccgcgctaccggcacgcccgccattcaggtcaacaccggtaaaggctgccatcttgacgcgcaaatgatcgccgacgccgcgccgcgcctgccgctggatgaccatggtattctgtttatcgaaaacgtcggtaatcttgtctgcccggccagcttcgatctgggcgaaaagcataaagtcgcagtgctttccgtgaccgaaggtgaagataagccgctgaaatatccccatatgtttgccgctgcgtcgctcatgctgctcaataaagtcgatctgctgccctacctcaattttgacgttgagaagtgcatcgccagcgcgcgtgaagtgaacccggagattgaaattatcctgatttccgccaccagcggcgaaggcatggatcagtggctggcctggctggaggcgcagcgatgtgcataggcgttccgggtcaaatccgcgccattgacggcaatcaggcaaaagttgacgtctgcggcattcagcgcgacgtcgatctcacattagtcggcagttgtgatgaaaacggtcagccgcgtctgggtcagtgggtgctggtccatgtcggattcgccatgagcgtcattaacgaagcggaagcgcgcgacacgctcgacgcgctacaaaatatgtttgatgttgagccggacgtcggcgcactgctgtatggtgaggagagataatgcgttttgttgacgagtaccgtgcgccggaacaggtaatgcagctcattgaacacctgcgtgaacgcgccgcccttcttccttacactgccgaacgaccgctgcgcattatggaagtctgcgggggtcatacccacgcgatttttaaatttggtctcgatcagttactgcccgaaaacgtggagtttattcacggccccggttgtccggtctgcgtgctgccaatgggacgcatcgacagttgcgtggaaatcgccagccatccggaggtgattttctgcacctttggcgatgccatgcgcgtgccggggaaacagggttctctgttgcaggctaaagcgcgcggcgcggatgtgcgtattgtttattctccgatggacgcgctgaagctggcgcaggataacccgacccgcaaagtggtatttttcgggctgggctttgaaaccaccatgccgaccaccgccatcacgctgcagcaggcaaaacagcgtgacgtgcgaaacttctactttttttgccagcacattacgctgatcccgacgctgcgtagcctactggagcagccggacaacggcattgacgcctttcttgcgccaggccacgtcagcatggtcatcggcaccgaggcgtaccagtttatcgccgccgattttcatcgcccgctggtggtggctggattcgaaccgcttgatctactgcaaggcgtggtcatgctggttgagcagaaaatagcggccctaagccaggttgaaaatcaataccgtcgcgtggtgccggatgccggaaacatgctggcgcagcaggccattgccgatgtgttctgcgttaatggcgatagcgagtggcgcggtctgggcgtgattgaatcctccggcgtccacctgacgccggagtatcagcgctttgacgccgaagcgcatttccgcccagcgccgcagcaggtctatgacgatccgcgcgcccgctgcggcgaagtgctgaccggcagatgcaagccgcatcagtgcccgctatttggtaaaacatgtaatccagagaccgcgttcggcgcgctgatggtctcttccgaaggcgcatgcgccgcctggtatcagtatcgtcagcaggagtgtgaagtttgaacaatatacaactcgcccacggcagcggcggccaggctatgcaacagttgattaatagcctgtttatggaggcctttgccaacccgtggctggcggaacaagaagatcaggcgcgtctggagctggcgcagctgacggcggagggcgaccgtctggcgttttctaccgatagctatgtgatcgatccgctctttttccccggcggcaatatcggcaaactggcgatttgcggtacggcgaacgacgttgcggtgagcggcgcgatcccccgctatctctcctgcggctttatccttgaagaagggctgccgatggagacgttaaaaagcgtggtcaatagcatggcggcgaccgcgcgggaagcggatatcgccattgtaaccggcgacaccaaagttgtgcagcgcggcgcggcggataaattatttatcaacactgccggcatgggggcgattcccgccgatattcgctggggcgcgcaaacgctgagcgttggcgatgtgctgttagtcagcggtacgcttggcgatcacggcgccactatcctcaacctgcgtgagcaactgggactggatggcgagctggcgagcgactgcgcagtattaacgccgcttattcagacgctgcgtcatattgacggagtgaaggcattgcgtgacgccacgcgcggcggcgtgaatgcggtcgcccatgagtttgcggcgtcctgcggttacggtattgaattgtccgaatccgcactgccgctcaaacctgccgtgcgcggcgtctgcgagctgttggggctggatgccctgaactttgccaacgaaggaaaactggtgattgccgttgaacggcaggccgcagatcgggcgttggcggcattacgcgcgcatccgctgggacgtgatgcggcgctgattggcgaagtcgtggaacgcaaaggcgttcgcttagccggactctatggcgtgaagcgaacccttgatttgccacacgccgaaccattacctcgtatatgctagcagcctgttgacagcatactgtaagccggataagacgcatttgcgtcgacatccggcattaacgctgcatgaacgcctgatggcgctttgcttatcaggcctacggagtgtgtgaccagcgagtttgcggtcagccatccggcaataacttacgacttatacctataattcatttaccgttttcgcaccgttttgcggtattttcctggaaaagcaacatgtcgtatacacccatgagcgatcttggacagcaaggcttgttcgatatcactcgtaccttattgcagcagcccgatttggcgtcgctcagtgaagcgctttcgcaactggtaaagcgttcagcgctcgccgacagcgccggcattgtgctatggcaggcgcagtcgcaacgcgcacaatattatgcgacgcgagaaaatggccgtcctgttgaatatgaagatgaaaccgtactggcgcacggcccggtacgtcgcatcctttctcgccccgatgcattgcactgtaatttccatgagtttaccgaaacctggccgcagcttgccgcgagcggcctctaccctgaatttggtcattactgtctgcttcctttagccgcggagggccgtattttcggcggctgcgaattcatccgtcaggaagatcgcccctggagtgaaaaggaatatgaccgtctgcatacgtttacccaaattgtcggcgtggtcgccgagcaaattcaaaaccgggtaaacaataacgtcgattatgatctgttgtgccgcgaacgcgataacttccgtattctggttgcgattaccaacgccgtcctgtcgcgtctggatattgatgaactggtaagcgaagtcgcaaaagagattcaccactatttcaatatcgacgcgatcagcatcgtgttgcgcagccatcgcaaaaataagctgaatatctactccacccactaccttgatgagcatcatccggcgcacgaacagagcgaagtcgacgaagccggcacgctcacggagcgcgtctttaaaagtaaagagatgctgcttatcaacctcaacgaacgcgatccgcttgccccctacgaacgcatgctgttcgatacctggggcaatcagatccagacgctttgcctgctgccgttgatgtccggcaagacgatgcttggcgtgctcaaactggcccagtgcgaagaaaaagtgtttaccaccgccaacctcaagctgctgcgtcagattgccgaacgggtagccattgccgtggataatgcgctggcctatcaggaaatccaccgactgaaggaacgcctggtcgacgaaaacctggcgctcacggaacagcttaataacgtcgacagcgagtttggcgagatcatcggacgcagcgaagcgatgtacaacgtgctaaagcaggttgagatggtggcgcagagcgacagtaccgtgctgattctgggcgaaacgggaaccggtaaagagttgattgcccgcgccattcacaacctgagcggacgtagcgggcgcaggatggtaaagatgaactgcgccgcgatgccggcggggctgctggaaagcgatctgtttggtcatgagcgcggcgcgtttaccggcgccagcgcgcagcggattggccgtttcgagctggcggataaaagctcgctgtttctggatgaagtgggcgacatgccgctggagctacagcctaagctgctgcgcgtccttcaggagcaagagtttgaacgtctcggcagcaataaactgatccagaccgacgtgcggctgatcgccgcgactaaccgcgatctgaaaaaaatggtcgccgatcgcgaattccgtaacgatctctactatcggctgaatgtttttccgatccagcttcctccgttgcgcgaacgtccggaagatattccactactggtcaaagcgttcactttcaaaatcgcccgccgaatggggcgtaatatcgacagcattcccgccgaaacgctgcgcacgcttagcagcatggaatggccggggaacgttcgcgagctggagaatgtcgtcgagcgcgccgtgctgctgacgcgcggcaatgtgctacaactgtcgctgccggatattaccgccgtaacgcccgatacctcgcctgttgcgactgaaagcgccaaagaaggcgaagatgaatatcagcttattatacgcgtgctgaaagagaccaatggcgtagtggctggaccaaaaggcgcggcgcagcgtctggggcttaaacgaaccaccctgctgtcgcgtatgaagcgattgggtattgataaagacgcgttagcgtaacgggttgccggatctgatccggcctggagatgatgcgcgccgtaggcctggcgcttccccttcacttcttgcgctgatatttttccggcaattccggaacggggcgcttatcgtcgataaggtgccgcacggtcaggacaggatgccgccaaagcattcgcggacctgcccaacgcataatctgcttcatctcctcgcgtttagccggctgatagcagtgcaccgggcactgcttacaggcgggtttttcctcgccaaatacgcatttatcaagacgtttttgcgcgtaggcgaacagcgcgtcgtaatgcccctgcaccgttgacgcctgtgggcactggctttcatacagcgcgatcatttttttgatcgtcagtttttcacgagcgatacgtttaccaggcatcgtgctctctccgaacattaaggtgtatttattttacaccttatccctctttagcactatcactgcatattgtcgccatttcgcaaataagaattattttcatttatccataccttgtgctatataacatagcaaaggctatattcgatgattaattaaccacattgttgcgagggatactatgacgaatctacatcgtctgaaaacactcctgattgccggtattgtcgcgatactcgcgctatcgccagcctatgcaaaagagaaatttaaagttatcaccacgtttaccgttattgccgacatggcgaaaaacgtggcgggcgacgcagcggaagtcagctcgattaccaaacccggcgctgaaatccatgagtatcagccaacgcccggcgatattaaacgagcgcagggggcacagcttatcctcgcgaatggtctgaacctggagcgatggttcgcccgcttttatcagcacctttccggcgtgccggaagtcgtcgtctccaccggcgtcaaaccgatgggcattaccgaaggcccgtataacggtaaaccgaacccgcacgcctggatgtcggcagaaaacgcgctgatttatgtcgataacattcgcgacgccctggtgaagtacgatccggataatgcgcagatctataagcaaaatgccgaacgctataaagcgaaaattcgccagatggccgatccgttgcgtgccgaactggaaaaaattcccgccgatcagcgctggttggtcaccagtgaaggcgcgttctcttacctggcgcgcgataacgacatgaaagagctttatctctggccaattaacgccgatcaacaggggacgccaaaacaggtgcgtaaagtgattgataccattaaaaagcaccatattcccgccatctttagcgagagtacggtttccgataaaccggcccgtcaggtcgcgcgtgaatccggcgcgcattatggcggcgtgctgtatgtcgattctctgagcgccgctgacggccctgtgccaacctatctggatctgctgcgcgtcacgaccgaaaccatcgtcaacggcattaacgacggactgaggagtcaacaatgagtcaatctgcgattaccgttgatcaagtcacggtgacgtatcgcaacggtcataccgccctacgggacgccacttttcaggtgcctggcggttcaatcgccgcgctggtaggcgtaaatggttccggtaagtctacgttatttaaagcgttaatgggctttgtgcatcttgcgcagggcgatatcactatcctgcaacagtcagtcaacaaggcactgaaaaaaaacctcattgcttatgttccgcaatcggaagaagtggactggtcatttccggtgctggtagaagatgtggtgatgatgggacgctacggccatatgggctggctacgccgtcccactgcgcatgatcacgcctgtgttgacgccgcgctggcgcgggtggatatgcaggagtatcgtcacaggcagattggcgagctgtccggcgggcagaaaaaacgtgtgtttcttgccagggccatcgctcaggatggacaggtgatcctgctggatgaaccttttaccggcgtggatgtaaaaaccgaagcgcgaatcatcgatctactgcgggaactgcgcgatgaaggccgcacgatgctggtctcaacgcataatctcggctccgtcaccgagttttgcgactatacggtaatgattaaaggaaccgtactggccagcggccctaccgaaaccacgtttaccgccgcgaatctggaacaggcgtttagcggcgttctacgtcatatcgcgttaagcggaggtgaagagcacatcatcaccgatgacgagcgcccctttatttcccggcgcgtggccagcggaggaaaatcgtcatgaactggcttgttgagccgtttggctaccagtatatgctcaacgcgatgtgggtctccgcgatggtgggcggtctgtgcgcgtttctctcctgctatttgatgctcaaaggctggtcgctcattggcgatgcgctatctcactctattgtgcctggcgtcgctggcgcctggatgttagggctgcccttctcgctcggcgcgtttctttccggcggactggcggcaggcagtatgctctttcttaaccaacgctcacgcctgaaagaagacgcgattatcgggcttatcttctcctctttttttggcgtcggcctttttatggtgtcgctcaatccgatgtcggtgaatatccagacgattattctcggcaacgtgctggcgatcgcaccagcggatattgcgcaactggcgattatcggcgcagtctcgctgacgattctgctgttaaagtggaaagatctgatggtcgtctttttcgatgaaacccatgcgcgttctatcgggcttaatccgggtcgactaaagctgttgtttttcactctattgtccgtctctaccgtggcggccctgcaaaccgttggggcgttcctggtgatctgtctcgtcgtcacgccgggcgcgacggcctggttactcaccgaccgttttccacgtctgctcatgattgccgtcgtgattggcagcctgaccagttttctgggcgcatggcttagctactggctggatggcgccacgggtggaattattgtcgtcatgcaaaccttactgttcatcacagcctttattttcgccccgaaacacggtctgttagccaaccgtcgacgcgcccgcctgcagaaggagccgacatgttcttaacaacgttactggaaccctttcagtttgattttatggtgaacgcccttatggtttcggtcattgtggcgattccctgcgccttactgtccgtgtttttagtgttaaaaggctgggcgttaatgggcgatgcaatgagtcatgcggtattccccggggtcgtgctggcatatattgtggggatccccctggcgattggcgctttcattgccggattattttgcgctatcgccaccggctatctggacgataacagccgcatcaaacgtgatacggtgatgggcatcgtcttttccgggatgtttggcgcaggtctggtgctctatgtttctattcaatcggaagtgcatctggatcacatcctgtttggggatatgctgggcgtatcgctgggggatatcgtacaaacgtcagttattgcactgggtattgcgttaatcatagggctgaaatggaaagatctcctgctacacgcttttgacccgcaccaggcgaaagccagcgggctgaataccacactactgcattatggcctgctatgtatgattgcgctgactatcgtcgccacgctgaaatcggtgggcattattctgtcaatctcactgcttatcgcccccggcgcaattgccattttgctgacgcgacgctttgcgcgcgcgctgggattagcggtgagtctgtcagttattaccgcttttgcgggcgtttatctgtctttttatcttgatagcgcgccagcgccgaccatcgtggtattatttgccatcgtgtttattgcggcatttatttacgcaacatggcgcgacaggcgtaatgaaatcgtaccagaggcgcaaggttaacacttttttgcctgctattcaggaaacatacggtcataatatagagtagtcttatggcgctggaaggatttcctctggcaggcaaccttataatttcattacggtttaagtaaagacttatattcagctatcctttttttatgagcggatatagagagttttttatcgtttagcataacggcattgttatcgaatcgctcataaagcgttcattctttttgtttactatactgcttcccgccgccggattggcctccacatattcatttaatcgttgtgcgccttgagtatgtttgtaaaaactcaccggcagatagcggtctgctttatcggacgggagaaaaggttcttcaccacacagacgttcacaaatattatcttcatgaatttttactaagttcataaattcaagctgaagttttttggcgagcgccaggctaaaaataccgcattcagaagagcttcgttgaatgtccagctcgaccatagcaaaataacaatcaggcagttgttcacgttcaagagctgctttggtcctcaacgccagtaaagcaggtccaaaagcgctacacgctgctggttcgaacaaaatcaccgatgtctttccgtccataactctaaaatcgacgactgaaatatggatacctgaacttcccatatttacgagaaatcgggcagattcaacgccttccattctggtctcctttatagaggaaacaagctcatggactgacataacaaatttaagatttaactctggatacttcttattggcctgtgcaacaagaaaaggcatcatttcgagatcggtttcctcgtaactgatatgaatccagctgccatctataatttcactttccagacgctcaacaatacaggtcaatgcttcggtgtttagctccccgctgacgtcaggctgaggcgataaactcgcccccatattacgagtcgtaggacttagcatacttttccctccacatgatagctcctgcaccgaaaatatcatctttaacttttcagattcaatatattgcctgcaaaaatatgcctcaatgattgagccaggctaccaaccacctccggatgattatatataagaattactactcaaaaaatcttttttataataaaagctcaacacatggtcataaatgataaaaaatattttaattcattcctaccgcaatcggtaacgcgcaattatcgtcaggtacagcagggttatgtgcaaaagcagtgcgctgtaaatgcgcgtctagtttcagtccccggaacagcgatagcggtgaagagtccatccccaaacgatacataaccttcttacgataaatactgacggtttttgttcccagaccaaattttttcgccagttcaattgccggatgtccggaggataataatatcagcagcgcatatttcgcctgcgtgacaccgggaggtagattccaccaggcgtattgattgatattaaacaatacctcttccggcgtctcgccggcattaaaagcatacgtagcagccacggttttcttttgtggcctgtggcagaaacgcagccaggcttccggaagacggagcttctctcgctccgagcggatagcgcaggatagttcgtcttttaaaacataatccataacgccaaaatattgcagcacacagcgatcgatataatacaagcgatctgccactaccaaaactttacggttctgcaaccgcgtcagcaacgcatgaaaaagataaacatgctcatgcgggttcaaagctaaaatcagcccggcgtccggcatatcggatagggaatgcaaaagtgcagttaatgagttacacgttttaacgcacttttccggatatttttgcttaaaaatagactgtagggcataacaattagtccagttaataccgtatataattacatttctcatttatttatccttttttgaaaactgaccacagcttcggtaatgatttttcttcctgggcgactactgcgcaagtagataacgccttcttactacaaaggtaataagaccagatacgttattacatgcgcaatgtcgttaccgaaatgaattccttttacaaatctgataatgattaaatttgctgttttactttactgtaatctcttagagtacaacgattgcccggcgcctggtggccatgtatgtctgacaatgaacgctttcgattccctttcattaactacatatcactggtgtagcgatactgaaatatacactacgattaaaaaaatatttggtatctgtaacgcaaacagatagtaacgtttaaaataatttcacaaatcaatggttcattgtacgcataaagctaagcggtgtaatcttaaaatgccgtttaaaaatagcgataaaataagaaggcgtatcatagccacacatcgtcgcgacttgtgaaatatttccagcccccatacgtaataattttatagcctgattcatacgagcatccaggtatattttactaaaactcacctcttcagcggccagttttcgcttcagacttgatacgctcataaacagctttcctgccacctcagcctgtgaccatttgcgggtgagatcgctgataataatgttataaactttctcttttgtcgtaatttttattgctcgctcaaggaaatcaaacccaccgggcttacgtacaaatgccgatataagatacatcaatgagaaatatgaataatcatgatcatcaatactcacattactacaaacccgtggacatgccacaccatgcaaaatagagtcaaaagtatcactcatccctggcaacaagtccgcatgaaaaaaatactttggtttcgtttttaatgatagctctcgatcattatagtttcttgtactgtaaaaaactttgtagaatttttgcattaagtcataggaaacttccagtgaagaaaaatcaatatgcccttctatttcgctcatactaagcgtgattgtttgatctttttccaataaaaataaacacggcgcagatcgttcgatgaactccccaaattcgttttcaattcgcaaactgcctttattaagtttaaacaataagcagtttgcgacataatagtctcttacgtcagctaatccatttattaatggaaatttgttcggctgttgaaggtgattattgctaatggcctcaactgatttattcattgaaggcaataccatattttatcctgtgtgctataaggaactcaaaatcgttatattcttataaacaaataattaaaactcacagagatgatttaaatccgatttttttattattatagccaataattacattccaacgcgcgttcatttcgtcacaaaaagatacccttacaaactttatgcacaattttgtaatgaaagcttacaatattaatataatcatttcagaataaaacggctggcagacatcttaataatccatatacatcaataagatagacacactggcatggtgcattttctgcattatttgctgatatatacaccataccttatcacaaatcgccagcaatgggggttcaccagtcaattgcctctttgttttccccgcccgataaaataatctcctgcatccaggaggtcatttgtgactgtgcgttcattgaaccaactaataccccgtttaaagcctcatataaatgggtgcccggttcaacttttgctaacatgttttgtagcatagccgtttgctgctcaaaagaaacaaaagccgaatcaccactgttaggatctttgaaggcattcatctcttgataaatgctatctttaagcgtttcagaagaggctgactcaggaagcgccaaaagtcgttggtagaatgcatcataaagatcaacgtcgccgccattgcttaaaggcgcgctatccatattattcagcatagcggccctggcactcaacgaaaccacacccgtcgcttcagtatctgctgtcgggaccaaataagaagtcggaatcgtacccggtatcaccttataacctccgcttgcgtttttgtcttccattcatcaataagtgcgttaatggcgttatcagaaattgtccggcagtcttgtggaagttcatcaagatgatgcttaatgacgcctactgccgtttcaacaaattgttcaggtgaaaattctgcgatctgatcgccgcaactcatgataaagcgctgttcctggtgatatttaagattaaaagtgcctggccagttctccataagcaacaccatcagtttttggtgatcttttttcgcattaactggcagtgttaaaaaaagttgcccctcaggcttatcgaaatcccttagccactcatccaggacggttaaaagcgtttcgggatggtcgaccgcagctgaaaataactcgcgggcataaatctgtattttttccatccacttccaggccattgtctgattatcagtaagataagcggcgacctgctgtaacgcgtctatcattccctgctcgtaaccttcctgataggcgtacatccgcaaggtctttgcctcttcttccgcctctcgcaaaatacgcttagcccgttgatgcgcctgctgttctaatctttcaatagagaaataacgttccagcgttttacgctttatcagtatcccctcaacaggcgaaagcggggacggtattgggatatttttgagcatattgtaaggccagtagcaaaattgacatttctacagcatcctgcttcaatgcctcctcaataaatggaggaaaaagcaaaggaaaacgctgtgctaaagattcaggtaaaaattcatttagggcatttaactgtgcatacccgacgctaagtaaaaaccggtgattcggcgccttattgcagacagataaacttgttccctgatgcattgccaaaaatgcttgcgcccaatccggcaggccaagcaaggctccctgccttgccagatcggctctcagtttatggcaaccgagtaaatacgctacttgcggcagtcggcgccactgacgcagccacagctgcgtcagtgagttttgaatacactccttttctccgttcttaagccgccatgccgccagtattaactcatttgccgccgccctggcggcgggtctgacaatcatttccggcgctatctgcaaccgctgaggatggatatacgataacggatcaaaaatgattctttgccagataatgggtaatggctgcctattcatttgacgatttcgccttatcatcagccgttatgcctttcttattgcgggcataatggtttttgtaataccagacgccaaagcctgctgacatcacggataacaaaataatcaaaacaatccaactggttgcaaaagaattacgttttactggtgtgccgggagcctgtaattgggcatcagaacgttctgacaacacaacagaaatgttgtcataatccacatcggcaaaactattctttaagaaacgcttgatatcgctgatctgatgcgcaagcggcgaacctcgttcatatacggctaatgccgacagatgaacaggttttggcgggcggccattttcaccagcatcaatatcataactaatatggaccctggcggagagcacgccctccatcgtctgtaatgactgttccagtcgctgttcaatagccgaatataacctggccttttcagctcgcggagacgataccagcgaatccgccgggaacatctgcgctatttccacccgtggccggggaggaagctgataagttttaatccagtacaccgcagcggtaaaatcaggctcagcaacggtaatgctatagcccaattttccgctatcaattttattcgcctctatattgtgcatttgcagaacggcaatgacctcattagcctgttcctggtccagtccttttaaaagatccttatccttacagccggcaagggtcattaccagcagaaaagtatatagatatcgacgaatcatgagcgtaatagcgtttcaacagccccgactcctttacgagtaagggtactgaccatagaaacatacaggttataatctgaaatcatctcttgcgaaatagccagctctttaggatccgtcaccagattagggtcctcaatcctgttggtaatcgtctgtttatccacagccgtggcaatcgccgaaccagaaaaagcctggagtagccggtcatccagcgagacaatgtccgtttccatagacctgatattgaccgcctgccctataacggcattctcagggacaatagttgcaatcgacataatccaccttataactgattaacggaagttctgaataatggcagcatcaatatccttaaagacttttaccgtgttcgattgcgcgttacggtacaagttatattccgagagcttactctgatacgccgccagtagcgccggatcggagggttttgctgctaatttatccagcgcctctgttacctgcgtttgtagattatcaacgcccgtatcaaattttgctgagacgtcatccagatagcctgaccaaggtgttgccataatgacttccttatttacgttaaattaaagtgggcttgggaaataccaatggcctgggctcattttgatataaccttccgccccgtactgaaatgagcgccccttgagccagtcatcttttaattcgatcgcaaactgcacatagcgtcctccccatgtgcggtaatagctatcgacaaattgacgggctctgagtatttctacatcatcgagcgccccctgaataacaaacgttacgccccccttatgattcctgcgggaataaggtaacgcctgctgttttagccccgcttccgcctggcctgctgcggtaacatcgtccatcaacgtgatgttaaccgaatccgcgtaaggcattagcgctctcagcttttgacttaacacctcgagctctttcttgctcatcgtgtttcgctggcggcttagccagaaaacgggtttacgcggctcatcgaaatgaatccgataataagccagctgcggataataggtatccagccagatagagatacgcttattttcttcgttttcgttaatcactcgcgcatttttatcataatcgcccctcgctaaaacctgacgagcccacaacgtatctctttcattttgcgcagcgacatagagcattttgtcccggcctggcaacacctgaaaacgctccttctcctgccccaataacgaatcgagctctgcggcctgccgctgcggcgagttaagtatccataacgtccccacagtcccaattcccaatataaaaaacccggccagtgctgctacaattccgtttttaaaacgcggctcgttcttttttgcagacgtttctaacttctcaggctgctcgggcacccacggctcgctttccgggcgaatcaggataagcaattcaccgacctgtattggcgtatttaattgcaccgaacgagattcagaatttccttctttcagctcatggagtataatttcggtcgcatccgtatccacctggatttcaaaatttactccgccatggtccagcgggataaaaaagctatcggcaggtatatcagggagttgacctgaagcagtgagcgcatcactctgacctaccacaaagagtgttcggcctgtcagcaatggaaactcacagccgttcagtgagctgttaagtaatcgaactatgtatggccctgggcttgttatcgtcttctcttttgatgtttccatatatactgttagcgatgtctgtcgttctcgatagcagcagattaccgcacaggacacagggattcctgatgaaaatagaatgaaaagtgagaaataaaatcaatttattctgtataatgcgtctcaacacatattaaaagaaccatcatccccattggggcttaaactactgtagataaattacccaaatttgggttcttttggtgtaacaatcagaccattgccaacacacgctaataaagagcatttacaactcagattttttcagtaggataccagtaaggaacattaaaataacatcaacaaagggataatatggaaaatgtaacctttgtaagtaatagtcatcagcgtcctgccgcagataacttacagaaattaaaatcacttttgacaaatacccggcagcaaattaaaagtcagactcagcaggttaccatcaaaaatctttatgtaagcagtttcactttagtttgctttcggagcggtaaactgacgattagcaataatcacgatacgatttactgtgacgaacctgggatgttggtgctcaaaaaagagcaggtagttaacgtgacgcttgaagaggtcaatggccacatggatttcgatatactcgagataccgacgcaacgacttggcgctctctatgcacttatcccaaacgagcagcaaaccaaaatggcggtacccacagagaaagcgcagaagatcttctatacgcctgactttcctgccagaagagaggtatttgaacatctgaaaacggcgttctcctgtacgaaggatacaagcaaaggttgcagtaactgtaacaacaaaagttgtattgaaaatgaagagttaattccttattttctgctgttcctgcttactgcttttctccgactcccggagagttatgagatcatccttagctcggctcagataacgttaaaggagcgcgtttacaacattatatcttcgtcacccagtagacagtggaagcttacggatgttgccgatcatatatttatgagtacgtcaacgctcaaacggaaacttgcagaagaaggtaccagctttagcgacatctacttatcggcaagaatgaatcaggcagcaaaacttttacgcataggcaaccataatgttaatgctgtagcattaaaatgtggttatgatagcacgtcctacttcattcaatgtttcaaaaaatattttaaaactacgccatcgacattcataaaaatggcgaaccattaacattttttgtatctgtcacttaagtaaagatttttattaaaattgtaataatttaaaattcagactgcgcattaacacgctctatcaggatgggaggctattcaatatcattgttctgtccggaagacagcttatactgatatctatggtaatttaaagtaaggctgattatataacacgatttttgtgaacttgtcatcgctatgatgactggtaaaacgatattgccttattcacatcgtaagaattcgtccagatgacactatctccttccggctttaaccctgtggattaaggccggcattttattcatatttatacatcatccgttccctctgagaactatttgcctgaacggtttataccgaaacagtcacgcttgttagctttctgccaggcatacctcctctcttcctcctgatatcgatataatgcctggagccagcctgaggatgatactgctcataaccctcctgcctttttgacgctataactgaagggagtaaagaaaagacgatatcattattttgcaaaaaaatataaaaataagcgcaccattaaaaacagtctttcatttatattttggaacctaagacaaattacactcttaaactttcaacgaatggtcatttagtggaaatcttcgagaaaaatggttctgatggtgtaattatcagaccattaaccatgaagatataataagcagcatttacaccccaaaaaaatgcagtaagatagctacaaaactaatctctattgcaatgaggccaagttaaatatgtaaatatttagatgcccggcgctgactctctctgcaccaggatatacggcagcgtccattcgataatcacagttagttataacaatattattaccaacatgtcagttatttaaagcacaggcataagctaaataatcaaatgttaaaaacatataaacccgagcccgtagaatatgacattaagctcataataaaagctcaacctgaccgttagtactaacagcagaattactgaaacagtagattctatcctaacgacttgtattagttattataacttttcaccctgtaagagaatacactattatcatgccacattttaatcctgttcctgtatcgaataaaaaattcgtctttgatgatttcatactcaacatggacggctccctgctacgctcagaaaagaaagtcaatattccgccaaaagaatatgccgttctggtcatcctgctcgaagccgccggcgagattgtgagtaaaaacaccttactggaccaggtatggggcgacgcggaagttaacgaagaatctcttacccgctgtatttatgccttacgacgtattctgtcggaagataaagagcatcgttacattgaaacactgtacggacagggctatcggtttaatcgtccggtcgtagtggtgtctccgccagcgccgcaacctacgactcatacattggcgatacttccttttcagatgcaggatcaggttcaatccgagagtctgcattactctatcgtgaagggattatcgcagtatgcgccctttggcctgagcgtgctgccggtgaccattacgaagaactgccgcagtgttaaggatattcttgagctcatggatcaattacgccccgattattatatctccgggcagatgatacccgatggtaatgataatattgtacagattgagatagttcgggttaaaggttatcacctgctgcaccaggaaagcattaagttgatagaacaccaacccgcttctctcttgcaaaacaaaattgcgaatcttttgctcagatgtattcccggacttcgctgggacacaaagcagattagcgagctaaattcgattgacagtactatggtttacttacgcggtaagcatgagttaaatcaatacaccccctatagcttacagcaagcgcttaaattgctgactcaatgcgttaacatgtcgccaaacagcattgcgccttactgtgcgctggcagaatgctacctcagcatggcgcaaatggggatttttgataaacaaaacgctatgatcaaagctaaagaacatgcgattaaggcgacagagctggaccacaataatccacaagctttaggattactggggctaattaatacgattcactcagaatacatcgtcgggagtttgctattcaaacaagctaacttactttcgcccatttctgcagatattaaatattattatggctggaatcttttcatggctggtcagttggaggaggccttacaaacgattaacgagtgtttaaaattggacccaacgcgcgcagccgcagggatcactaagctgtggattacctattatcataccggtattgatgatgctatacgtttaggcgatgaattacgctcacaacacctgcaggataatccaatattattaagtatgcaggttatgtttctttcgcttaaaggtaaacatgaactggcacgaaaattaactaaagaaatatccacgcaggaaataacaggacttattgctgttaatcttctttacgctgaatattgtcagaatagtgagcgtgccttaccgacgataagagaatttctggaaagtgaacagcgtatagataataatccgggattattaccgttagtgctggttgcccacggcgaagctattgccgagaaaatgtggaataaatttaaaaacgaagacaatatttggttcaaaagatggaaacaggatccccgcttgattaaattacggtaaaatctgagagaggagatatgcattatttttttatcatcgtaatctggttgcttagcataaatacggcatgggctgattgctggcttcaggctgaaaaaatgttcaatattgaatccgaactactttacgctatcgcccagcaggaatcggcgatgaaacctggcgccattggtcataaccgagatggttcaaccgatcttggcctgatgcaaattaacagcttccatatgaaaaggctgaaaaaaatggggattagtgaaaaacagttgttacaggacccctgcatttctgtcattgtgggcgcctccattttatcagatatgatgaaaatctacggttatagctgggaggccgttggcgcttataatgccgggacgtcgccgaaacgatcggatataaggaaacgttatgctaaaaaaatttgggagaattacagaaaattaaaaggaatgtcagcagaagagaaaaacaaaagactttctatcgcggcaaacaaataattatacagaaatagcttactttcagatagttctaaaagtaagctatgtttttatcagcttgccgtcgtcataagcaactgggcttgcattgcttttagttgtacaaactgtgaggcgtcttccagcattctattgttccgtgaatcccggaaatctgcacgtacctgctccagattactatgaggattatccttaagtacaagggccgccgccatcgttccggttcttcccactccgcccagacaatgaatcatcggtaaatgcttatctgatgaactacgccccggcgcgccattttggttactatttttcaccctatccgccaggtattctaactgatccgtagacggtaacggctggtgatctggccaatttttcacatgcaataccgggattgtataccgcttttccccgcaggacagttgcatattgtattggtctatcgcttctccctgactggctgagctcactttttggctgttggtatgcacctcgccaaaggtgtagctccctctgaaatagggtggtaattgttttgcctgcatctgatcttccgacgttaacaccaccaggcacgagcattctttttcaagaagcattttcatatgcgcttccagcgcatccggcgtattttttgggtacgaaccggctaatgccacaggcttaccgtcaaaagttaacgtattcactggcacaggcattccatcgctcagtttcacctgggtttgctgattaattggaatgctgctgaccgcaaatcgtgccaggcccagtgtcggtccgctcatcgtctgtggcattggcgcgccggcttctattttctcaagttcagctgtaacatttttcagttctttagcaataacgtgaattttttttacagcctgggttaattcatgagtagaggctttatcaacccacctctcaacctctcctccacaggttccccattgtgagaaccgggctacaccgacctgaatatttgttaacgttgtaacataatcattaagttgtttagcctctggaattttatttaaattctgtaaattcgtcattaatgaacgcagcgggccgttacctgaagccatctcctggaagttttctcgcaggctatttccatccatttgttccagttgcggtaatgttcttttaagtccctttagcgcgatatcgagtaaaggttgcttactttctgctccaacatcgttatttttttctgccacttttgtatcgccgccttttatgactaaagcggcattcctgacaccaacattatccttgctcttaataaggtttataaacccttcgtcagcagcttttacacactccgtgatctgcactgctaaacgttgggtaaggggtttgttcatatttatacgggacattaacagtgcgtcattaaccgctgtttccccatatttttccgttagtgcatggagaaatgtctgtaaaatcttttggtcctgtactctgatattttccgtatgtttttgcaccacttcagtgtttttaaataacggcatttttccaagccaggttaatacttttgacgaaaatttttcaggcgcaacatatgccttatcagtattttccttagcaatataaagtcgggcatcattcgacacaccaacttttgaaaacgaagacaacgttaaattattcaattttctctcctcatactttagcatattcctgcagtatgtttttgagcgcttcctgctgattcacaaatgactcaagctgcgatataatatggtaagtatttgtcagatcggtaattgcatgtataagcaacaacgtctctgcggcatcaatatacgctaacgtaccttcattattcgcagccagttcaccattaatcaccataatctgccgccagatagaatcgccacaaacaggcgataacggtataatcataccgttcaataaccagatatcatctttagcttcaatagacgtaaaaatatcgctatcgagtaataataagcactgattgttgtcgtcaaaagtgagcggtaaacccaatttctcaccaatattagcgataatatcctggtgtgcttgcaatttactttcctcttgaattatatcttttataagattgcttcttcaaatttaatctggttacacaatgtcttgatactttttcgcgcccatcgccgggcgcaatatttctctcctttaatccagtagaatagccattcactacgcatcggaacacatatcagcagctccttcggatcattttcaacatgacgtaacttgcctttaataacaaaacgcgaactgtcagcaatatcatcatatattgcagccatacctgaaccgggtactacatgtgtgatgattttcataacaattaatcttattcaattgttgtcaagcgagagaaaaatactacaccctggactcaagactttttttaacaacacggcatatatccgcaaaggtcatcatatcaggaagatcgttttcattgcaactaatgtcaaactcctcactaagaccaaatacaatatcaattaaatccaatgagtcagcgtaaagatcctcaaccagatgggtctgaccattgatactatcaacatcaacggcaatacaagaggtgatcacttttttgactcttgcttcaatatccatattcatcgcatctttcccggttaattaacgctgcatgtgcaagccatcaacggtagtaataacccgatccacgccaggtttattcaggtatgactcgtaagccgggccagctcgccagctaccgtctccgataaggccgtccagcacattacttaacacatagtcagtttccccttttagcctggtcagccccgcctctctggcaaactgcagtgcaatctcagccagtttttctttttgtggatgatgagtaatgacctctttgagagtctccattttcgctttcaattctgggtgcttgtcaatatcgctacattgcgctttcaacgctgcactctttatcgtgtcattgggtaatatttccgcacgcaagccgtcaaacgctctgcgtacagggaacggtgtggaggtatctggctccagggctttacgtatcacacccaaaaacgtctcacgggcgtcgaaatgcattgaatgcatattcgtaacgctcggtactgttgagaggaaactattttgcttaaacttcaaaccagaaaatgggccagtcttatctgtctgactattatcattatcggtcgtaccggctttattacctgtaattaccgtcgtgtctgattgtaaggtatcggttttaacattctcgacgccagccagttgactggcaagcggcttcacattcacaatctctgccgtctggctttgctgtttattatcatcaacgccgtgcaccgtggcctgtaccggcttgccgataatgctcttgctggttacgccatcgacttcatcaaaagaggttgtttcacccgtagtgcccttttctgacgtgaccacctttccatctttactttcggatgaagcgttggtcacagcctctgccgtcgcatgagccgtgacgtcaattttacccgcgatgccatggtcaattgcccctgtgctggcgctgtgtgccgtctccgtttgatgcgtagtcgaatccacacgcgaatgactatgacttacgttgctgctgttagtcgaatggtgtgactcgccattgcgttggctgttatcaataaatgttcggctattatcaatcgtcttccggctattatcatggttgctattatcgatatagcgctggctattatcgacatggcttcggctattgttaatatgcttactgttatccacgctatggttactgctatcaatattaatattgatattaatacccgtaggttctgcttttttcccaccatcaggtactggtccagccgcaggctccggaattttagggtcaggcagtttatctgcaggaatttgtgcaaaaacattacgtagcagcaggggtatcaacgtttgcatttcaaggtgccgggcttcccgtcctacgctggtaccctgctcttgcgttaatttttggtggcacatatcaagcgcctcaacagccttcgccgccgctttgtcaacaaggtgcgtaagattgctgcgggttaacggatctaacgtacagccaaagttatgttcaatgcagctggcaatatagggcatcacctcctgcataacaagattcgtcgataatttacttaattcaccgccagtgttatttttgataatatctaacagctgcttttccaggttttccagcttcgcttccgctttctttgtttctggcagccatggcccaaaagctgacttttctttcaggccatcttttatgatttgcgcggtatactctgcccccaccttcatcagtagcgtcttcgcctcaggagaatcactggtggcgttgagcgctgaacgaaagagcccggcaaactccattatcgctttcttaccggcgacattatttgaattggtaaaaacttcttttaacgcctcagcgtctttcccgcatttaaacaatgcatccagactcgcctgtttgatcagcgcgggaaaatcttccagttgcgggcctttaatttcccctgacagcgtcgctgtggcactttctctgactgcggaaagattcgccgcaagattcgtggcctgcgttttgatctcggtctgcatacctggcattatgacggggggctgagtccttacacttgtaaccattattaatatcctcttctgttatccttgcaggaagcttttggcggtttccaggctgctacttatcgtactgctcagcacttttaccaggttgtcgtacaatgaattggcattgctatatttttgcgtcagcgtctgtaatgtggttttcatattttcttcctgcgctttaaaacccgactgccaggcttgatatttggcgttatccatttcgagttttgagtcttttcccggcgcgcctaaaccatcaatatcctgaaccattttttgtaatggcgtcagatcaacggtgacgacataaccggatccataagatttcaggcagctattcggtaaattcaattcactgagccactgtctcgcttccgcttcagtggctactttaacgccgctgcctgactgcgctggaaataaaacggtattactgtttatttgattatatttattgactaaactgtttaaatcatttttgagtgaggtaacatctagcttaacggtattaccgtccttacctggtaataaccagcctcccattttggaaagaatatcactgaaggcctgataaaaatcggtatagactgcgacaacgttttcataaacgcccagatagctgtcacctatcgccgatatattttgggaaaccatatcccaaatctcagcatcagaaatggttgttctcggctgcgccataggcgaagcgctaaataaggccgacgtcggcgcagaaaacgcgctccgcaggttctcattttgttctgcggataatgacacgccggacttcgccagcgcattcaggctgctggtcaactgctggcgcgccagcgtgcgctcgtcattattctcttcagagatcggtggcgttgactgcagcgtctgctgtgcctggtggattttagtagccgcctgcgataatgaaatgatatctgtaccgcgatgttctgtggtagacggtaccacggcagtctcgacgtgctcgctcgccgagggagtctgcggccgttcggcaacgatccccggatgaggagaagcggaataattttgaatattaagcataatatccccagttcgccatcaggagcgcgattaaatcacacccatgatggcgtatagatgacctttcagattaagcgcgaatattgcctgcgatagcagcgagtgcggatgctttcgactggttaatgctctccattgttttcagcatttcctgaatcaggctggtcgatttacgtgaactttcacgggcttcgtccgatgcggtgctggcaacccggttattcacctggctaatttgctgctcggaacgttcctgagtagcggcgtactgcccggacgcccctgcaataccaccgaccgtgaccgagttcttcataatcagatcgcccgtcatctgcatcttgcgcgcatcgattcgggtcatatccatggtattctgctcaagacgaatatcggattcgacagactcaagacgtttcgacagaatagcctgatgttcaggggagatttgtttattactgtctttaatacccagactttccgtggcgctggttccggcattagatttaagcgtcgcatcattaagatttttcgtcgcatcggtaccggttttcttcatatttaacgatttcagagaatcgacgccttcagcaccgagtttgacgctattctgcccgttcagcacgtttttaatactgtggctttcagtggtcagtttatcgatcttcgcggcattatgtttaagcgcgcctctttcattctgcagccccttatattccagtttggcgcccacgccagtgatccccaactgaagcgcgctctgggaaatactaccggacaacgcattcatcccttcgcgcatcatggagcttgccgtcgttttagctgcatcaaaactgactaatgacaacttaccagacagtttgctatcagcctggttcaacgtcagcattaacgtattcgcggcagccaacagcgcaacggcactggaagacattccgctaatatcaaaaaactttccgacttctgcctgctgctcgcgtaactgggtttgcacaacctcattcgctttagtcgtgacattatttgccagagcattcaaatcctgattcatgtcggtattttgaatactggcttttaaaaaggacgtgatcgttccgggggtttgcgttaatacccctggcgcaggcgcgctcagtgtaggactcaaccccaggtcactgactttactgctgctaataccaatactattcagaatatctttagcgctaacggattgcgaagctgtctgtgaactattctcaacagaatgattatttaaataagcggcgggatttattcccacattactaattaacatatttttctccctttattttggcagtttttatgcgcgactctggcgcagaataaaacgcgaagcatccgcattttgctgtaccgcagaagacatggctttttgcagttccgccgttaccttctggttttcaccaaatatttctacggattgtttaagccactgctgaatctgatccatggcaaaacgggcgagcataaaatcagcaagcgcctcgctggcatttttaataaatacgccctcggcaacaccaccggctgactgggctgcggtattcgtgacttccatgcccaacgccactttatttagggtattacctaccagctctttacttaaggcattcgtttgcaggcccatcttgctacccacattacccagaccgctagtaatacgttgcatcccctgggtaaagagtttgctgccgttttgcgccaactgtttcagcacgttaggcaccaacttcttaatcgtttcgcccatcattttgctcagcgcgttacccagtttcgccgccgcgcctttcccgacaactgcgaccaccacaatgaccgccaccatggcaatagcggcgacaatcgcaccaacaatgctgccggccatctctgccgttttcttatcgacgcctaatccttccagcgctttggtaatcgccttgccaatcagctccattaacggcttcagcacatgctccataatcgggtttagcgcctgctgaataaacgacactcccgtcgccgccttcacaatttcatcggccaccattaccgcaagtcccaccgcagccagcgccagactcgccccaccggtaaaaacagcggccacaacgctgacaatggttagcagcgcgccgaggactttcccgatacatcccataatgcggttcgtttcctcggctttgcgcgtctcttcctggaattcagccgatttcttttccatctccgcctgacgcccttcctgcaaggcgttgaaaagcgcaagatcgttttgcaggctttcttccgtatttttgcccacaatctcaataaacatggccatgagcatagtgaggcgggcgacatttgacagattatcctgctcaccctgggaaacctgattctgagaggcggcattagccgttccctggaatttggtcagaatgttatccgctttctcggctttcgctttggcgtctgtgcctgctttaaccgtcgcatccgtggccttatctaaggcctctttcgcctctgtcgcttcttttccggcctgttctaccgcggcttcagcttgtgcatagccggggtcagccgggtccagcgattgcaatttattttgcgcctgcgtcagttttttggtcgcagcgtcataaacactcttggcggtatccgtctttttgatactggcttcatagagatccgtcgcctcctgagcctctcccagagccgtctggaattctttcgatacctgaatccccatctctttttgtgactcaatcatcgcctgccataccgccagacgagactccagttgagacagcgaaacatcgcccagtagggtcattaacttgccaagcagtaatgtcaattgcccttcgctggagagtttttcccgggcggcgtccgtaggcggctttagacccaccgtattaatagcgctctcgccggactttgttccggctttaaggtcgcccgctttcgttgccaccacatctttaaaagctttatccgccgcttttaaaaagtccgtgttcttacgaacgccttcaaaagccgcctcagcgaggcgcggattttgggtatatccgctacggctaatgctacttgcgtcatttaccataattattccttttcttgttcactgtgctgctctgtctccgccgtttttagcgcctccagatagaccaacgcttttgcccgcagagactcatcttcagtacgttcattgacaagttcaaaacactgtctggcttttgctgccttacgcattaataattgacactgcccggtaaaaaaaacggggcgataatcatttttaagtaacgtaaacgctactgcataaaggtcacatgctttctgaaattgttttttcagttggcatactgccgccagtcccatggtgtaatcgggattgtaaaaatcataaatgcataagaaacgaaagaacgtctcagcttcatccagtcgtccctggttataaaactcataagcatgagcatataaaccgtccatcatatcttgagggatcccatgaacgtcttttagcgtggcgccttcactaacggcatcccaaatcatttccgcaacacgttcttcgctgacattattttgataatccattacttactcctgttatctgtcaccgactttgtagaacttaacgactgcgtttatctgatgcagttattaaaccccgacggtggttagtgaacattcaaaaaacgcccaatgaatacatcgctactgccttacgcggctcaatgccgtacctcgttttcttgtggctgaataacgtctttgcccgcgttttctacctcttccagccaaaccagaagacgtaaaacttcatcaatttcttccagactcaccagatcataacggcgatgggttttgaaaagactgcgcgccagtttgatatcgacgatcacaggtacgccaaccttctccgcataggcgcggacggccagtgcgcgctgattcgtttcatacaccgagatcatcggaatcggcatcaattcgggtttaaaataaatcccgatcgtaatatgcgtggggttggcaacaatcaggcgtgagttttcaatatcagatttcacctgttcagacagaatttccatatgaacttcacgtcttttagatttaacctctgggttcccttcctgctccttcatttcacgcttcacttcttccttatccattttcatatctttcatggtcaggaaatattccgcaatagcatccaataataagacaatcaatgcgcaagcaaggcaagttaataccaatgcgaggagaagttcacgccaaatgacggcaatacctacaatattgccatttagctgagaaaagatttcaaccttatatttcttccagcaaatgatggcggccaccacaaaggatgagagatacagtagggttttgaccgtatctttaaccgtgcgcatactaaaaagtttttttgccccttctaccgggtttaacgccgataaattaggctttaatgcttctgtcgccagcacaaaaccggcctgtaataacgccggtaatgcggaacacactaagcagagcagcataaatggaatcagatattttaaccctatcccaaaaacggccaaactgtagtcagccatgctctgatcaaaattatccgcaataatgatcttaattatccccataaactcattaaatgagccatacgacaccagataggcaattcctcccagcgtcaggcaggcgataatgagatctttacttttaaatgactggccttttttagcggagtcttccagccgttttttagtcggtttttctgttttattcgaggacatgcgtcgcccctcgctcgtaaaaccaactgcttaaccctgtggcctggaaagagagtcgcagtacattgtccggtagtaccggagagaaataaagcagcataattaaaacggcaataccgctttttaccgtcagtgaaatcgcaaaagcgttcatttgcggagcaaagcgcgacaataaacccaggaatacttctgacagcaacagcactaataccaccggactggccagaaccaaggcgttttgagccacctgattaataaacgttaatagcggcggtaatgaaggcgtgcactcgttcatcggatcgcatagctgatagcttttatttaacacgtcaaccatcgtgaccagaccgccgttttgtaaataaacgacagcggcaaacatattcaggaaattagccatttccgaggtatcaataccgtttgccggatcgatactactacttagcgttgcccctcgctggttatcgataatacaacccagcgcatgcataacccaaaaaggccatgacagcagacagcccagcatgacgcctaccgccgcttcttgcagaactaacgggatcatcgccaccgataaaaacggcggcgcctcgttcaatgcatgcggccatactcccaatgccaccaggatgataatggcgtttctcggcgcaccgcttaataccccgctattcaaaaacggcaggaagaaaaaaatcggcgccacgcgagcaaaccctagcgccgcagacgcaaccaggtgatgaatttcaaagtacaacgcgtaaaacattttttaccccttagccaacgccaggaatatcacctgacgcccgtaagagagtaaaacttcgccataccagccagacagtaaaaacaagcataaacacacgccaagtaatttaatgccaaaaggcagcgtctgttcctgtaattgcgttaccgtctggaataaccctaccaggaggccgataatcgttgcgacaatcgtcggccaccctgacaggatcaaaacaagatagagcgccttattacctgcaaacactaaatcatccatttaactatcccgtctcgtaatgatgtcatgttgcaatgtccatatactgtaatatcaatcccttagacagtaaggtccagccatcaagcgcgacaaaaagcaccagcttaataggtgtagatatcgtcaccggactcatcatcatcatccccagcgccagtagcacgctggataccaccaggtcgacgacgacaaagggcaaataaagataaaaaccaattttaaacgcgctttttatttcgctcagcgcataagcaggtaataacgcaaatattgaaggtttttcaatttcatctttgtcacgctttaccgtctcggtctcttctccatactgacgcttcagttgcgcgttttcaaaaaactgaactaactcgcgatctgaatatttgatcagataatcgcgataaccatccagaccttcatcaacgtgtttacttaatgatgaaatatcattaaaggtgacatcttcgtcctcaaaatagacgtaggcatcatgcattatgggccacataacaaacatagaaagcagcaatgcgacgccgttaagcgtcatatttgaaggtatctgctgtaatcccagggcgttacgcaccatgacaaatacaatagaaaatttaacgaaacaggttcctgacgcaataataaatggcaacagggtggaaaatgccagtaaggcaattaatgagatatcattccccattaccagactcgctcagccattcatggatctcaacgcctaaggtgtcattcatctgtaccagttcgccattacccagcaaaacaccattcgccataatttcaacgttaagttcagcattggtcggcagtgataatagctgttgctgccccatggcttcgagttcggcgagggtaacgttcttacgatacaaaacaaattccagtttgacgggcaattgattcaagccaggcagagtttctgcagtttcagttgtattattttcttcttcgatatgttgaatatctaacgtttccacaataattcccccttcaacacggttgaaatgacctaactttttcgcgtagcaataaacttccgcacgggaagtacgaatcaggagtacatctccgatcccgattcggcccagcaacgaacgctgcgtatcactgctaccgattacaaagcgcaacggccaacgcagcattttcggcctgccgcccccgactgcaggcagttcaggaagatgctcaaaccacaggccgccccgatcgctcataatgtgcaacaatttcccttccggcagcgcgcttcccggtacggggttctctacgcataaacgccgacaggacaaatgcggcacgggcaactcaaacggtcgctctgttgcagcaagccagggaacgaccaggtgctcagcgccagcagaaaccgccgccccagccagagcgggagagacatgctcaagccagtccccaggtttaatccaggccgaccaccgtttttctgcatcgctcaaccgaacccacattccctgtcgcgtcggatattccagcgtcgcttcccggccatggcgctggcattctgtcgcggtttgcgccaatagccattcgcgacgatcaatctgtctcacacgcaatgacatcaggcgtcatcctcctcgccagattgctgtctgtgctgttgctgctgcggattttgttgatcgtctcgcgtcaggtgccagcgctggggattaccgttttgccattgatcatgcaaacgatgttcaacctgcgtatttgacggtattaacgaaaactcccctgcttgccgcgcctgaatattgacggaatagtcatttccccagcgctgaaaacggtaagtcagcgagctatcctctcctttcacgccatcggcagtgggaaaaatagtcatcatcggctttgattgcgccgctaaaggcattttttcatcgccgccggttaattggctaagatcggcgatagtggttggttgcagcggaagctgagaaacatctttaacctttttatgatctttatcttcaggcttaccggtattggctgcggccattcgggcaggtgcgacatcccgcgccagcggcgcgccctctttacgaacgccttcgcccgcgatggctttattatccccaggcaatgccttgatattatcgtcagagattcccgtggcgttatcggttacttcactaacggattccacagcttttaaatcagcagataattttttaccgcttacgctttctaacggcctatttttagacgatagcaacgctgcggatttatctactttggcctccgcagagatcaaaccgacagatttttcagcagtgactttcaacagtttttcagcaatcctgagttcgctttttccgttatgatgcagaccagaaacgttgccattgtgatgttctgatttcgctggcgcgccatgtcgccatgccgccagtaataacggtaaagccgtttctttatgcattacgaaagcatcgccatagtcgcgatcttttttatcaccggaatattctgtcttatgtttttccaccgctttttttaatgcttctgataaaccgccaacctcatcctgctgcggcagtaaaatgttcccggatgaactgacagctgacacatcgcccattaaattatctcctctgactcggcctcttcctgctgtatctctcgctggatatagaatcttttctgacggattatccagcgttgatagttcccttctttgcgcaaccaatatttactttttttctgaaactcttcccttttcttttccagctcgctccgtttttcctgaatttgtataatctggagttctaaatcttttatctgccggcgaacaatagactgcttacgtaataacgtataaatttcctcacgactgagctgtctgttttctgcacgcagcgtatctaataacaatttcagacccgctatttgttcaaggatcgcctcctcctcggcctgcagcccgcggtcctcatcctgatagcgaagtaatatcgactcacactgtgaatgaaataccgtacagcgccgctgcaatactttaattctggtcagcgaatgcattcataccgctcaacgtgtcatcaaaggatgaatactgcgctaccggctggcataaccaggctttcaggctatcccgcatctgcatcgcccgatcgttatcgatattttcgccaggacgatattctcccaagtcaatgaaaagctggagctcttccaaacgcgtcattaatttacgcacggcagatgcctgttcagcatgtgtcggcgtcgtgacttgtccaaaaacgcggcttacgcttttcagtacatcgattgccgggtaatgtccctgcccggccagctttctgctcagatacaggtgaccgtcaaggatagagcgaatttcatccgccatcgggtccgcctcttcctcgctttccagcagtaccgtataaaaggcagtaatgcttccctcgctggtcgcccctgggcgttccagcaagcggggcaaattatcgaatacggaggcgggataacctcgacgagccggacgctctcccgacgccagtgccacgtctcgcaaagcacgcgcataacgggtcatggaatcgataaaaagcacgacccgttttccctggtcgcgaaaatattccgctacggttgtcgccagttgcgccgcattgcagcgatcgaccgaggggaaatcggaagtggcaaaaaccagcacgcatttttctttcttatgcgaagcgcgcaacatatccacgaattcagtgacctcacggcctcgttcaccgataagaccgataacaaagacatccgcctccgtttgctcgatcagcatatgcatcagcatggtcttaccgcatcctgcggaggcaaaaatgcccattcgctggcctacgccacaggtcaataacccgtcaatcgcgcgcacaccggtaatcagcggttcacggacgccaacgcgtgaagcgtaagacggcggtgcgacatcaataacgcgttcttcgctaatcggcgccacttcaggggtaaaacgctcaacgattttccctgtcggatccaacaccgcgcctaataccgagtatcccacccacgccgataacgcacgtccagtgggataaagcacgacatcgcggctcagcccctgggcattgccgataaggctcagcacggtgcgttcccgctgtaagccaaccacctgcgcacgtgcaacaacctgtttttggtgccagccacggcgtatttcacacagttcgccaatggccacatcgcgcaattccgcctcaataattgggccggttattttttgtgggtaggccagatattgcagtaaacgaggtgttttcatctcattagcgaccgactaaaaacttccagatagttgtaaaacccattcaaggcagtagagaacttttcaccgtcagataaaaaatccggatgcactaaggctttaagcgttagctccccattctgctcccccagtagtaattgcccgccgcgggcaaaatggcatccttccattatggtcattaagatttcataagcccgctgttgtaataccaccatgctgtcagcacccaattgcgcccagatccatacatcatcgtccttgacgctgatacagatacttggcaatgcaaataaatccagaacaattgttgaatggctatctattcctccaattaatgaaggatcgcaaccacttacttccagtgcggaacgaactaattcagcgatatccaaatgttgcatagatcttttccttaattaagcccttatattgtttttataacattcactgacttgctatctgctatctcaccgaaagataaaacctccagatccggaaaacgaccttcaatcattttcttaataaatcgacggacatcgacagacgtaaggaggacaagatctttatgtgcaatcaataaatcatccaacttaagtgtaatgagatccatcaaattagcggaggcttccgggtcaaggctgaggaaggtactgccagaggtctgacggatccctttgcgaataacatcctcaacttcagcagataccattactgctcgtaattcgccgccattggcgaatttatgacaaatataacgcgccattgctccacgaatatgctccacaaggttaatgacatctttttctcttggcgcccacaatgcgagcgcttccataattaacttcatattacgcacggaaacacgttcgcttaacaaacgctgcaaaacttcagatatacgttgtaccgtggcatgtctgagcacttctttaagtaaatcaggaaatttcgcttccagttggtccagcatatgttttgtttcctgaataccgaaatattcattgacgttgcgcgccagcgtcaccgccagacagtggtaaagctcatcaagcgcgttccgcaacacatagccaagctcccggagtttctccccctcttcatgcgttacccagaaatactgactgctaccttgctgatggattgttggattaataccaaaggacacgacttcatcggaataatttaccactcgcatcaaatcaaaatagaccgtaaattgttcaacacggatctcattaatcaacaatacgatgctgttatcgtccaggccctcgccatcgcgtaacaatacttccggcaggcgcacgccataatcaataaagaactgactacgtagacgctccgcaagttgagctttttccagatcttcacgccggctcttcggcacaagtaatatcaacggtacggtctctgtagagactttatcgagatcgccaatcagtcctaacgacgacccttctttttcctcaatactgagcggctgctcgcctttgctggttttaggtttggcggcgctacgttttgcttcacggaatttaaaatagaagagtacgcttaaaaccaccgataaaataacaaaaaccggcagtgggaatcccggcagagttcccattgaaatggtcaaaatagccgtaacaaccaatacaaatgggttgttcaacagctgcgtcatgatattccgccccatattatcgctatcgccatttacgcgggtcacgataaaaccggcactaatcgcaatcaacaatgcggggatctgggcgacaagaccatcaccaatggtcagcatggtataagtagacagggcggaggacaaatccataccatggcgagtcatccccaccgaaataccgccaataaagttcacaaagataataatgatgccggcaatagcgtcacctttgataaacttcatcgcaccgtcaaaggaaccgtaaagctggctttccctttccagtacgcttcgccgttcgcgcgcggcatccgcatcaataataccggccttcaaatcggcatcaatactcatctgtttaccgggcataccatccagagaaaatcgggccgcgacttccgcgacacgttctgaacctttggtaataacgataaactggaccacggtgacaatagagaagacaacaaaacccaccgccaggctatcgccaataacgaattgcccgaacgtggcgataatttcaccggcatcggcttcaatcaagataagacgactggtactgatcgataatgccagacgaaagagcgtggtaattaacagtaccgcaggaaacgttgaaaaactgaggattctgtcaatgtagaacgaccccataaacaccaatatcgccagtacgatattcagtgcgatcaggaaatcaaccagataggtaggtaatggaatgacgaacatagaaatgatcatcaccattagtaccagaatcagtaattcaggtcgtaaacgagcactgttaagtagagaaagcagcactataggtatcctgttaatattaaattaagacagcttttcaatagtacgacgctgttctgccatttcatgcttgtaggcaatatcggtcatactacgtaacgccattaacaattcttcctgccaatattcttcataaaagagtgaagagggtatggctttacatacttgataaaatatctgcaaaaaggatgcatgttctttatgactaagcaataacgcattcaaacctataatatcggctaacagcgaatccacttcatgtggctgttgcaatagcgaaagcatcagtagtaaccacgacgactcctccgcattaaacgctttggtaaacgaatacgacaacaatgtactcacaaacagtaggtcagcggagcgcaacattttaagttgcgtcaggcgtcgtaaaagctggccaaactccaggcgcgaacagctggcgtcattcgcgtcaatatcggttaatagcgaaccctcaataaaatccagtaccaccagtcgacgttgatagccataactggctatccagtcagagtaaatctccacttcatgtgattcactctggataaattgccgatagctggcgcgcaataagcctggttttaacgataatgttttcccaaaaagccgggccttcaacgcacaattaatccctgccttgagggtcttcggatcggtttgctcttcaacgtgcttaagtaacgactccagctttttccgcacgatctcttccaggtctttacgacgaagcaattcgcgtaacacaaggactaaatcactggggtcaggaaataagctacgcgcctgacgtaaaaaatcttctaacgcgccgccatgtacgctaattagctttaagatttgcttcgccttcggtaaagcctcatcctccagcacgcgttcaaaactgttagataaattactggattttttttcataatcgcgacggttacgaaattgcgccagcgccgctgacatttcgtccgtcgactggacaaatttttgtacttccgcccctggagacgaatcctctgcggcctgttgtatttccgcctgttgcgcatcagtatgctgggtcgcatcctgatgagatgtctgccgggacaatattctggaaaatgaaataccggaggttgagccaggaatcatttaattgcctcctgacctctatccagataaacacgaacccatttctgtaacttatcgtccccactccaggcaccgctttgcttcagaatattgtttaccgattcgctggcatccggcgttaacgggtcgacaatttcttttggttcaatcatgaacacacgaacaacattacttttattcttactggaataacggaacaggctaccaataagcggtaatttgcctaaaaacggaatactttggacagtatcggtatttgcatcccgtgtataacccccgaccagcaaactttttccgtgcggcactctcgcaatagtgctaattaacgttcgcccgacttcgggtaacgcatctacggaggtggtagtatcagattgcggcgtcttatcgttgccatcttcaatgtccagcgacatttctatctgaccatctgcggaaaaacggggcagcactcggatcattgttccgtatgttacatgctcaagcgccacattacgttccccaatcagcttggtgtaaaacgttctgttgttatcaaaaatagcgggaacattttcctgagtcagtaataccgggcgcgaaaccaccgtcgcctgtttcttctcttctaacgcattgaccgcggcgatgaatcgactgccatcgagggtacttattgaagactggtttaatgacacgccaagtttgtccccaatagttatgctgccgctccatgaagtgcccaaacgctccagatcgcttttattaagatcgacaatccacagggataattctacgtgacgtttggcgacatccagcgctttaaccagcatttcgataaaatgcacctgctcagccgttccctttactaacaaactgttggtatccggataggccacgattttaatattgcccgccgcggcattttgctttaaagcttcctgcagactcatgccaccggcataatttgctgctttacctttttctccattcgctgaaaacgctggcatcgccgggggttcgctactgacaatattacctaagggttgctcttctccctgcaataacctttcaatggccgtagcaataccgggaataaccattttctgatcgcgcagattataggtacgatcgcccacgaaggtattgttcagacgcatcacccctattttctggcgtcccagctcaataccatcgttttgcttgtccatcatggtggcggcgttgaccaccatatcaacatagacgggtggccctgaaacatagaatgttcctttacggttatcgccacgtagcgggtaatttttgttatataaacctgagcgttttagaaaattgttgaactcattgagtgagacgttgcgtaaagaaaccacggcattgcgcatttcactggcgtcataaatatagatagcctgcccatcgaaataccaaatcagccccagttgtagggaaagcttctccagtaatgcgttaggatcgtgaaactcaaagttgcccgtaattttttttcgtgccgccattttgctaacaatgacaggctcctttagctgtagcgccatggcatcgaaaaatgtccgcaggctatcgtctttcgcaacaaacccacttcccgttacaggtattttttcactagaataaccaggtgtaaccagaacaagcgcggcacatgccagcactctggccaaaagaatatgtgtcttcatttgtctgccaattgaataatatttgataatttccgcggcgaaacgccgatcagctctttgatctcactagaaaaatgtgaaggcgatgagtaaccatgattaacggctaattgggtgatgttctcgtggccttctacactattcagcagcgattgcgccatacgccagtttcgtaattcactcttcgcttttccgcccaacgctctgctgcacaaacgacgaaaatgggtataagaaacgccatagtcttctcccagcattctcatcgtgttgccgctggttgactgagcgagtaaatagccaaccaaccagtaactctcgctttttcgtaacagcgccagtaccttattgaaggccggagaaggcgtaataatttgctgcaaaaaccagtactcgcagcgtttacgatcttgccaaatagcgcgaaactcaggactcagcaaaacccatttatcggattcagcatatgtcgtgtccactaatcctgcgccatcgataaatgccagtaatttgctgagtacttcaatttttaacggtcgaaaaaccaggtctcctgatactggtgcgacaacggcctgctcgcaaaaaagcagcgcgccttcctgaatcaggcaattttcattgtgtcggctttcagaaaatgacatatgcagcttttgcgcggaacacgtctgtataaaccatgcttccgggctgcggattttccgcttctctccttctttaagtacttcctgcgtatttagcatagttgtcagcaccagttaaaaatcattttaatatgtaaacaataccgggagcgggtggcaaaatcctgatgcaatcattatgaaactgatgccgcccgctaattaaattggccaacttgcatagtgtttgctgatttaaaatagaaaattagctcatagtgtataaattctggcttattgttctgcagcagcaaaaattcagatattgtcatctggatggagaattaattatttatatcaggagttttttttgctagcattcctgaaacgcattcgcccccttataactattgtcagataacgttctgacggttgtgtaaaaacatggcgcctcattcttctgtagttggagttaatatgaaaaaattttatagctgtcttcctgtctttttactgatcggctgtgctcaggtgcccctcccttcctccgtgagcaaaccggtacagcaacctggcgctcagaaagagcaactggccaacgcaaatagtattgatgagtgtcagtctcttccgtatgtgccgtcagaccttgcgaagaataaatcattatcaaaccataacgctgataattccgcatcaaaaaatagcgcaatcagctcaagcattttttgcgaaaaatataaacaaaccaaagaacaggcgctcaccttcttccaggaacatccacaatacatgcgttcgaaagaagatgaagagcaactcatgaccgaatttaaaaaagttttgcttgaacccggaagtaagaatttaagcatatatcagacgttacttgctgcccatgaaagactgcaagccttataaggccatatcaccgttggctgaactcatcatgatataattaagaccatattttgcattgccacttaatatcaatataattattatagctatggtcacttttacggttggccatttgtctcttacgttgcatttatcaatctgctttttgatacagcagcacctcgctgctgctttttttatttgtgataaagaacggcctcccagacttgggaaatagccgaaacttatactgacaaactatcgtctcgtatatcgcgataaactgacatccccctcctgccccacatgttggcattcttacgataccccatccacttttcgcggataacgctctttttacccgtgacagcgtattgacgaccaggctagtatagcggcagaaacgtcccgatgcctggaatgaatggcaaacagtctataaggtgattgaatggatacgacagaagaactaaacggaacctacttctaccacggacaatcgaacctgtcagcaggtgaactatttgatgtaattttcattgagcaattttgtgatgaacttgggattggcattgagtcaggtgctgctatcctcgccgggcaaccgtggttaaaaaccagaacgaaaccgggagaggcaatcaaagggacaagtgttatctccaggtatgggagaatgcttttacgaaatgcacgaactccttttggtattagagttcctacacccgttggtataagaatgcgaaaaacaaataatcttgccgcagtcatagcacgatatgttccatggttaggttgggttggtcttgtgaattcaatttaccaggtatcaaggagaactcaggcaaaatacaacctaatagcacgccctaaagatcgtatacaatggacatccttttgatggacacaattcagcaagaggtgttagcactcttccgtgaagagattcccggatatttagacagcaattggaaagaaatcccattagaacttgattctgatttatttgaagctccaggcgatgacctgcatgaagctttggataaatttgaaaaaaaatttaatgtagatttatcacaagttaaatggtcgtgttatttcccttgggagaatactccactgcttacacgatggtttaaattaaaacgggaagatgtagaacgaactcgtaagcctttaacaatcagaatgttttctgaatcagcgaaagctgggaaatggctttatgattaatgaaaaatatgtcgaattaatcaggagctaattactatgaattttgttaatcgattaaaattaaaagtagtaaatttcatatacttttcaaattaaaataatgtgttgtatctacctttcgaccaccagtaactctgacgccatccgttttaaattgaccatttggttctggtggtatatcgcaagtagatatttctgaagtgcttgactattcactcttttttagcctgcatgtatggtggcgacgatgctgttacataggtaccggtatattaccaaattgattctgccagatatcccgcctcacgtagagcattcataattttattcgctaattcatactgatattcatacgaggtattctccatggaaaataccgttaattcatatttataatacagccaaccatcattctcatttatcaacttaggattacagtcataatttctttctattgtaatcattgtattttcgtatcttaaatataataagttcacttttattatgtctggaatcccttgggataaaaaatcaattaactcatatttatccagatcagactcaacaacgattgtgaattcagagttaacttcttccattatggaacctcaatatatgggcctctattaaacggtgatgattgtttcattaccgatacctgtatttttgttacatcatccggatgaaagtgtaggatatacatcctcccatatgccaccttcatcaccagggcctaatgcacgccgttgagcctttgttgatttttaaccttctgatcttactcagcaatagtggacacgcaactaagtgagtaaacgctcaagcaagaggtgactcacatgacaaaaccagcatcaaccaccaataagccacgcaagcagcacacgcctgaaagccctgaaactggcggaacgcattggggtggccgctgccaccagcgagcttaacctgtataaatcacagatctacagctggcgaaactcagctctcttcttctgaacgtgagcaggagatgtccgccgcttagggttgtgtccctattacgcgggtaggatcaatcaagcagttacggcaaaaaagagaatcatggatatatttagcaaactccctgatgatacgtaatcagtgagattaaaataatgcaatcgcgataaaccgaagttaatcccctgtttaaagacagtgagcgaccttcttgccatgcctggactatatcagcctcatatgtacgccttgaaagcgtacagatatgtattataattgtacatattgttcataaacaggaggatgaaaaccatgcctcagatagctatagaatctaacgaaaggctgtcgttacgtgtatcgacggatgccaaaaagttgatagtccgcgctgcggcaatccagcaaaccaacctgacggattttgtggtcagtaacatactacctgtcgcacagaagattgttgatgccgccgaacgggtatatctgacggagcgcgatactaaaatgatcatggaaattttagataacccgccagcgccgaatgaaaagcttcttgccgctgctttcgccctgccggacatgaagaaatgatgtttacagactggcatgaggccgcgatagggaaaacccacaatcgaatgaattttgattgtggggatgccgatctgaaccaattcctgcaacgccatgcacgacaaaatcatgagaaagggacaacgaaaacctatgttgcgcttgataattcggatgttacacgtatccacggcttttactcagtcagtcctgcatcactgatatatgcacaggttcccggcgcaatcagcaaaggattagggagatacgatgtgccggtgtttcgtctgggtcgtttagccgtagacaaatctatgcaggggcaagggctgggagcacaacttttgttatctgccggaaagcgttgcatacaggcggctttgcaggtcggtggcgtagccctacttattgatgccaaaaataaacaggtctgcgactggtacaaaggatttggcgcagtaccattaaacgatcaacccctttccttgttgctgtcgtttaaaacgctttatgctgctttatctgcatctggtaggttatgacaacatgaggctttgttgaataattcagaatcggccaacgataaggatacaggactcccaccggagcactcgttatacgagcctgacgctggtcggcattgccaacaacgtcatccggttcagcgctttgaccatcgccatcgcttcacccacctgcgcgtcatagttccgcaggctcagatggccgcccagcaaggttttgatacggaacatcgctgtttccactactgaacgacggtgatagcccactttcttttccagacctcattgctgccgctccgatgttgattttaaacttttgctttgccatcggaacccgatgctgaaacgacagtaacgattagatccgccaatctctttattcaacaaagccccttcgggatagagcttccgctgagcgggaaagtatgcctttgcaattaatcaataaagtgttgcgcgagaaatcgtgcatctttcaagcacatcgtctactttaattaaccgattcataaaatatatattatctgttcatttctagcctgtaggatattttaataactgtatattttaaacaataaaaattaatattggcctacttttttgttataataccagactccaaaattgtgctataggaacatcatggaattaattcgttatgctgacatcaacagcgatctctatcgccacatttgggtcgttggtgatattcatggatgttactccttattgttaaccagactggctcaattaaatttctctcctgataccgatctcttgatctccactggagataacattgatcgaggaaaagaaaaccttgaaacactgagactgttaaataccccatggtttatttctgtagtgggtaatcatgaagctatggcgcttgacgcttttgaaacacaggatggcaatttctggtatgtaaacggtggttactggtacgactcggtcaccgaaaaagacaggcaagaagccactgagctattactaacttttaagcagcgtcctcacatcatagaagttgaaacgtcctcaaagaagtacgtgattgcccatgccgattatccagatgacagctacgattatgggaagcaagttgatattgatagcgttctatggtcacgcgatcgtctgcttggttcgttacaggggaatatccatccaatacgcggtgcggatacttttatcttcggccatatgattgttgactacacaacaacattcgccaatcaaatctacattgacaccggttctttctgttcaggcaatctgtctttttttaaaataaagtaatctggaaatagaattatataatatcaaccctccctgcattatgggcaatgatatagccttcaataagtaccattgcccattcgtaatagcgtctaaatttcgcgtttttctgcccatttcagcattaagatcgcaggccaaaaaaacgaagccgtaatccgacgcaggtagttactcgatcgcctgagaagagtaaagatcgcacagctccagatacctatcggaagaaaacgcaataaccgtggtggcgaaatggatcggcttgccttcatgcaacacaatcttgattacagtctcgagttcggaagcatccgtttccctcttaattttgttgaaatttctctttgttgcgagcatggtctgaactaattgcctggcagcttgccttgtttcgtcaatatttggaaaatcgaacacatttccaacttttactttcaagacagaacttggcttcctaccctcactgacattacgatctgacgaggctactcttcgctggattacgtaggtttttttcgtcaaactggcttttaccccgaaaccagcaggagcttctctgtggtcatcgaaaacagtgtagagtttttgagctgggttagcttcgaaaacgatttttccagagcgactgagtgcaggcttaacattgatacttaacttgttgataatgaaaggctggctgagagttgttttcaaagtatcacccctgttgtagtccaggaatgatgagaatgtaacctgtcacattttaggctacaggtgagctacaaatttatgggtttatgtgagtttataagggttttacctggggccacatgagcacttgaaagaataaaaaaacgagtaaaatcaatatgaatgagtcatttgataaggacttctccaaccacaccccgatgatgcagcagtatctcaagctgaaagcccagcatccggagatcctgctcttttatcgtatgggagacttttacgagctgttttatgacgacgcaaagcgtgcgtcgcagttgctcgatatttcgctgaccaaacgcggcgcatcggctggcgaacctatccctatggcgggtatcccgcaccacgccgtagaaaactacctcgcgaaactggtcaatcagggcgaatccgtcgctatttgcgaacagattggcgatccggccaccagcaaaggtcccgttgaacgtaaggtcgtgcgtatcgttacgcctggcactatcagcgatgaagccctgttacaggagcgtcaggataacctgctggcggctatctggcaggatggtaaaggttacggttacgccacgctggatatcagctccgggcgctttcgtctgagcgaacccgccgaccgtgaaacgatggccgcagagctgcagcgcaccaatcccgccgaactgttgtatgccgaagattttgctgaaatggcgttaatagagggacgccggggtctgcgccgtcgcccgttgtgggagtttgagattgataccgcccgccagcagttaaatctgcagttcggtacgcgggatctggtcggtttcggcgtcgaaaatgcctcgcgtggattatgtgcggcaggctgcctgttacagtacgtaaaagatacccagcgcacctccctgccgcatattcgttccattacgatggaacgccagcaggacagcatcattatggatgccgcgacccgccgcaatctggaaattacccagaacctggccggtggtgtcgaaaataccctcgccgcggtgcttgactgtaccgtgacgccaatgggtagccgaatgcttaaacgctggctgcatatgccggtacgaaataccgacatattacgtgaacgccagcagaccatcggcgccttgcaggacaccgtcagcgaactgcaaccggtgctgcgtcaggtcggcgatttggagcgtatccttgcgcgtctggcgctgcgcaccgcgcgtccgcgcgatctcgcccgaatgcgtcacgccttccagcagctgccggaattgcacgctcagcttgaaaccgttgacagcgcgccggtacaggcgttgcgtaaaaaaatgggcgatttcgccgagctgcgcgacctcctggaacgcgccattattgacgcgccgccggtactggtccgcgacggcggcgttattgcgcccggctaccatgaagagctggacgaatggcgcgcgctggcggacggcgccaccgattatctcgatcgtctggaaattcgcgagcgcgagcgtaccgggctggatacgctgaaagtcggctataacgcggtacatggttattacattcagattagccgtggtcaaagccatctggcgcccatcaattatgtgcgtcgccagacgctgaaaaatgccgaacgctacattattcctgagcttaaagagtacgaagataaagttctgacctcgaaaggcaaagcgctggcgctggaaaaacagctatatgacgaattgtttgatctgctgttgccgcatctggccgatttacagcagagcgccaacgcgctggcggagctggatgtgctggttaacctggccgaacgcgcctggacgctgaattacacctgcccgacatttaccgataaacccggtatccgtattaccgaaggtcgccacccggtggttgaacaggtactgaatgagccgtttatcgctaacccgctcaatttatcgccgcagcgccggatgttgatcattaccggccccaatatgggcggtaaaagtacctatatgcgacaaacggcattgattgccctgctggcctatatcggcagttacgttccggcgcaaaacgtggaaatcggccccatcgaccgtatttttacccgcgtcggcgcagcggacgacctggcctccgggcgttcgacctttatggtggagatgaccgaaaccgcgaacattctgcataatgccacggaaaacagtctggtattgatggatgaaatcgggcgcggtacctccacgtatgacgggctgtcgttggcctgggcctgcgcggagaatctcgcgaataagattaaagcgttaacgctgttcgctacccactacttcgagctgacccaattaccggagaaaatggaaggcgtggcgaacgtccacctggatgcgctggaacacggcgatactatcgcgtttatgcacagcgtgcaggacggcgcggcaagtaagagctatggcctggcggtcgcggcgcttgcgggcgtccctaaagaagtcatcaaacgcgcgcgccagaaactccgcgagctggaaagcatctcgcccaatgcggcggcaacgcaggtggacggcacgcaaatgtcgttgcttgccgccccggaggagacatcgcctgccgttgaagcgctggagaatctcgatccggactccctgacgccacgccaggcgctggagtggatctatcggctgaaaagtctggtgtaaacgtgtcagacccgatagcgccgcgctatcgggtctgcgcgccggaacaggcttttcaggctgtgactgtcgtttcgtgtaaatgacgccagactatccgtcctctttccctttttaaaatgaccgtcgaccagcgtaccgtctcggcctggcccggcagttgctgtcgctcacgataacgcagcgcggcgccttccggccactccgccacaaggtcaatgtgctcaaccacgataaccagacccgggcgacacgcgcgctgcgcctggaaaaaagcgcccagcgccggataatccagacaaacaccgcctggcgttatcatcgtaaaatcagcagcgaaacgcgctatcaacgcctccaggctacccacccccttactaagccagttctcaatcgccgcatgggcatgaataatttcttctttatatggattcatgatctttcctttttcaggcacagaagcgcctgtctattgtttagacagacagcgtaaataaggggcagcagggtgataccggcggcggcaataaaggtccagcgataagcaacctcaagcgacataacgcgctggagcgcatttaacagcagcgtcaacagcgtcgcgccaaggaaaaagctgatctgacgattaagattccatagcgcgctggcgtcaggcatgtcccggcgagcaatagtcaggaaagcgccactctgcgcggtactgctgcacaaactgccgccagcgcccattaaggcgaatatcatcatcagtacacggtgcgatgtcgcaggcgtaacgttagttaaaagcagtatccctgcggcctgaagaagacagccgacgataatcagcggacgcggcccaagccgattgaagtaacgtccggtaagcataatggcgacaaatgaagcgatcgaccaggggatcatcagcgaccccgccgccgcaggcgatagctgcgcgacgttctgtagataaaacatcccgaccacgctgataccaatgaacatacccggcacacacagatagacgatcatggcaaaacgcagcagcctgtccgtcaacaacggcagatggagcaatcttgctgacgccattgtcgtcgacgcgacattcagccaacgataagcgagcaataaggtgagaacggccaccggcagcgtggcaaagaatatccagcgccagccgcacgtttccaccagcagcccgccaatcgcaggcgaacatgccggcgccagtagcgccaccatcatgacaaccgatgacacgccagcgcgttcatgcggtttaaactgttgccaggttaacgcctgaccaaccgggatcaataagccaccgcccgccccctgcacaatacgccagaaaacaaggctgtgtaatgaatcggcaaaacctgcggcagcggcggcaacgctaaacagaatgagcgaaaatatgatcagccgtcgtgcgccgagataacgcgaaagaaacgcgctaaacggaacgatcagcgttaatcctgcgatataaccgttactcacccatgccagcgccgatatggacgtatgcagatccacggacatcgcaggaaaagccacgctggcaataaacagattaatcagatcaagaaagaagccgagcaggtaaaccactgccactttactgcgatacgtcattatgcatcctccgtcagaggcgctaatgtagccgtccggagaaagccagataagtccgcgcttcaacgatatactgtcaaaataattttgacagtaaaggagctcgccatgctcaatttgcagcgtatgtcgctgtttatcgccgtggtagatagcggcagcttcacggccgccgccgccgcatcgggccaaacaaaagcggtagtgagttttaatattcggcagcttgaaaaagagcttggcgtaacgttactgctacgttccacccgacgattgacgctcacagacgccggcgtcctcttttaccaaaaaggcgtgaatttactcaacgcagcgaaaaatttgcaggatgaagtgcgtgccagccatagtgggctgggcggcgagttacgtattaccactacgcccgagtttggcgaacaggtgatcattccgttactggcgcagtttagtcagcgccatcccgatctccgtattcggcatatgtcctcatcacatcatgccgatttaattgccgagcgctttgatgtggcgattcggcttggctcgctggccgactcccgctatcgcgccgcgctgatatcccgctttaccattctgccggtcgccgcgccgcagtggctcgcccgcaaccccgtgtcgtcgctggagtcgttggctcaggcggaatggattattcatgagcgattacctacgccgctacggtggacagtaacgagtaatcatggccaacactcacgcctggagataagcaaagccggcaaaatttctgtcgacagcgcgcgctcgctgatggccttcgctctcgcgggaagcggcgtcgcattactgccgcaatggttagtcaacaccgcactggaggatggaacgttaattcacgtgttacccgactatcattttccccgtcagggcatttatgccgtttacccggacgcccgccatgtatcgacaaaagtacgcgcatttattgattttttacgttcgcaatgggattgcggggagcacgccccatcatcgtagccagtccgggagcattgcgctcccggacggataatactgtcttaatccttaactaccagcttgtctttgatcccctgcgcctgccaacgcacccacagcataattgccgccagaacaacaatcggcagtaacggatcgagccaactaccgccggaaccgaacagcaggttaatcagcaccacgccggtgccgccaatcgcccaggcaatggtcgtcggtacagaccaaaccaccatctgctgtttgacatcagagacgcccatcatgcggttaaccacccagaacaggctatcgttgaagtagccgaagaacagcgaccccatcgttgcggcctgagcggcaagcaacatattgatgccggggatctgcgccaggatcggcgcggaaatcgaggcggcagtgatcatcgccaccgtccccgatccctgaatcaggcgtaccagcgtcgccacgataaacgggatcaggatcggcgagatcggcaggttggcaacctgctccgccagctgttgccccgcgccgctgtcgcgcaggatcgcgcccaacgcgccgccagcgcccgtgaccagtaagataatcccggcgctttgcaagccctcttccagacgctctgcggtggtatgtttatccatgcgcggcaccagcgtatacaccgccagcagaacgctgatggccaacgcgatcaccggacttcccacaaagttgattgcctgtaccaccggatgcgtcgccaggccggaccatccttctacagtggcgagggtggaacagatagccttcaggaagatcagcacgatcggcaccacaataggcagcagagagagcgtcaggctcggcagatccttttgctctttctctttattgtactgctccagcgcggcattgacttcatcggcgttcagcgtgcgcggcacgaaatcagggtagcgtttatccagccactgcgcatagaacacaatgccgatcacacagggcaccgccagcgccatcccggtcaataacattgcgccgatgtcgacgttaaaaatcccggctacccccagcggaccgggcgtcggaggtaccgtatggtgagtgaccaccagcccgcccgccagcgcgacgcccagcgtcagtagcgaacgcttaccgcttttcgccagcgctttcgccaccggataaagaatgacaaaagcggaatcgacgaaaatggggatgctgacaatataacccgtgatcgccagcgcccactcttcacggcgtttccccagccatttgataaagctccaggcgatacgctccgccgcgccggaaacctccagcaagcgccccatcattacgccgagaccaatcaccaggccaatgctgcccagcgtcgtaccgaatccgctggtgatgacagagagcgttttatcaatgcccattccccccaacagaccggcaatacaggccgccgccagcatcgcgatcagcgcatgaacacgggtgcgtaacaccagccataccagcacgaaaacggcaacgatcagaccgataattggggtcggtaaacttgtcatgacctcccctccatatcatcttgtcgaaagcgttcgataatgtcatcgaagcgtttatcggcgacaaaacctaacgccagcgcacgctggttatcgatacgtcccggccaggaggcaacaattttctcgacgccttcgtcgcgctgatgcgtaacccgatcgcgcgccgcctggccgcccgcctgacacaacgtttccagcatctcgcccacggttacgctgatcccgggtaagttgatgctgctcgcctcgccaggcgcgggtaacgttgcggccagcgacaggttatggatcaccgtcgccgggctggaaatccacagccgcaaactttccgacaccgggcagacggtcgtctcgccctgcaacggttcacgaataatcgcgctgacaaaagaagaagcggcgcggtttggtttacccgggcgaacacagatcgtcggcaaacgcagcgccagcccatccacatagcctttgcgggtatagtcgttgaccaacagttcacaggcggccttctgcgcgccataagacgagcgcggcgtgagcgcggtggtatcggtgacgcattccggcagcgtaccgccataaacggcaagcgagctggagaagacaaaacgaattttctgcggttgtcgacgacacgcctcaagtaactggcgggtaagatccaggttaactttccatcccagatcgaaatcgtcttccgcatgactgctgacaatcgcagcgagatgataaacaacagaggtattagcggtaatcacactctccagcacgcccggctgggttaagtcagcctccaggcagcgtaaacgaggggaatctgataaccgtgcaggcatttttaaatcaacaagaagcagttcgttaaacgccagcgatgagtttaataaggcgcttgcgagtttctggcctaaaaagccgcccccgccggtaatgataatctgcatccggatgtcctctttattgctgtgtagggtagttcagggttagcgccaggcgttaaaccagccaagcccgtcctgagtggtattccgtggttggtattcgcagcctatccagccgcgataacctacgtcatcgaacagccggaacagccatgggtagttgatctcgccatcatccggttcatgtctgtccggtagcgaggcgatttgtacatgggcatagcggcccgcatactcgcgaatcaggtgactcaaattgccatccactttttgcgcgtggaaagtgtcgagctggatgaacacattcgggcggtcaacctcttctgcgatgcccagcgcctgatattggctggaaaagaggtagccgggtttaacgccgggactcagcgcttcgatcaaaatacgtttatcgtgggcggcaaaccggtcggcggcataacgcaaattatcgataaacgtggcgcgataacgtgcgccatcagcgccatccggcacgacgcccgccatgatgtgaacctgctcgcattccagcgccagagcgtattccagagccagatcgatatcggcgcgcgcgtcgtgttcgcgccccggtagcgcggcacgtccccattcgcccgccgcggtatcgcccgccgaagtattaaacagcgccagcgtcagattatgacgcgatagctgggctttaatctcgctggcggcaaagtcataggggaacagaaactcaacggcctgaaaaccggcttcagcagcggcggcaaaacgctcgataaacggcgcttcggtaaacatcatcgacaaattggcggcaaaacgcggcatcgggttatctccttaactgcgcaatttcttcggtggttaaataacgaatcgggcgttcgccaaggataaaaatcagctttgccgtctcttccagctcctcggtattattagcggcttcctgcaaattctccccgcacacgaccggcccatgattagccagtaaaaaggcctgatgccgggccgccagcgcagccaaatcgcgggcaattcggtcatcccccgggcgatagtagggaaccagcggaatgtcgcccatccgcatcaccacatagggggtaaacgggcgaatcacattttgcgggtccagcccttcgagacaggaaagcgccgttgaccaggtgctgtgcagatgtatcacggccttgcagcaagggttattgcgatacaacgccagatgaaaacgcacctctttagacggtttatcgccgctgagccattcgccctgcgggtccactttggatagccgctgcgggtcgagattacccagacacgaaccggtgggcgtcgccagaatattgccgtccggcagtaacagcgagaggttgcctgccgagccggtggcatagccgcgctggaaaaacgaggcggctatcctgaccatctcttctcgcaaagcgtgctcttcttttgccagtatcgtcatacctgaaactccctttgagcgcggatgaaaaaggattcatcgccaaaattacctgactttagcgccagcgagactggcgcatggagcgcgttgacccacggcacgccgggtgaaatgcacggtccgatgtgaaaaccggtaataccgaggctttgcgtcaccacgcccgaggtttcgccgcccgccacaataaaccgggtgataccgctttccgctaagcgagcagccagcagggaaaagagcgcctctaccgcatggctggcttcggtagcgccatattgctgctggatggcggccagcgcctgcgtggaggcggtggcgctaatcattggcgccagttcgctgtcctgactgagcacccactgcgccagcgcttcagcgtaggcctcgcgcgtctcggatgacaggcagcgcgccacatcaacgtcgcgtgtgggagcatgttgtcgatagaaagccacctgctgattcgtcatttgcgaacaggaaccggaaagcaccaccgcgcggccgctcagcggatagcctgcggaacgggcctgagaaacgccgtgcttcgcccactgacgcgccagccccattgccagcccggaaccgccggtcaccagcggagcatcacgcaaaacctcgccctggatttccaggtgccgctcattgagcgcgtcaagtactgcgtagcgatatccttcctgctgtaaacgcgacagcgccgcacgggtcgcggcaacgccttcatcaagcgtctgagctggaataacgccgcagcgcccttgcgcctgcgcttccatcagacgcggcaggtagctgtcggtcatcggattgattgggtggtggcgcataccggactccgccagcaagtggttcatgacaaacagatagccctgataaaccgtgcgtccgttaaccggcagcgcgggagaaatcacggtaaatgaggtatccagcgccaccatcagcgcatcggtgaccgggccgatattgccttcggcggtactatcgaaagtcgagcaatatttgaaatagacttgctggcagccctgttttttcagccataccagcgccgccagcgattgttttatcgcctcttgcgccgggcatgagcgggttttcaggctgataaccaccgcgtcgcacccttccggttgcgtcccggttgggacatcattgatctgcactgtcggcatcccgttttcgaccagaaaactggcgatgtcggtcgcgccggtaaaatcatcggcaatgacgccaatttttaacatgacggctcctcaggcgtgacgccaggcagagtaatccccgagaaaattttgatcacagcgctgtcatcctctttgccataaccggcgttactggcgctggtgaacatatttaacgccgtagaggccagcggtaaggggaagcgcagcgctttcgccgtgtcggcaaccagccccaaatctttgacaaaaatgtcgacggccgaacgcggggtatagtcgccgtcaacgacatgctgcatacggttttcaaacatccaggagttgccggcggcatgggtcacgacgtcatacatcacgtccagaggaataccggcccgcgcggccagcgccatcgcttcggccgccgccgcaatatgcacgccagccagcagttgatgaatgattttgacggttgagcctgcgcccggcgtatcgctgatgcgataaacgttgctggcaacggcgtccagcacaggcttcaggcgggtaaacgccgcctcgctcccggaggccatcaccgtcatttcgccctgcgccgcttttactgcaccgccggaaaccggcgcatccagcatgttaagattcaatgccgtcaacgccgcggcgatctcttgcgcgtcggcgcttgagatcgtggacgaaaccatcaccgcgcttccgggtttcatcagatgggcgacgccatcctcaccgaataacacctgtctgacctgggcggcattgacgaccagaatgactaacgcatccacgacgccggcgaactccctggcgctggcggcagccccacaagccccttcagcgagcagattcgcgcacgcttgcgggttaagatcggccccccatgtggaaagcccggcgcgcaggcatgaacgcgcagcgcccattcccattgagccaagccccacaatgccgacatgaaaatcggttcctgttgtcattatcactccatgttaatttacgtgatattatgttttgttatgtgaatataggcgtttttgtaaacaattacggtgagttgtttcacaaaaaataacaaaatgtgttattttttgtgaaggcaatcctcatagaacttcacacgctgtgacgagaaatcgcgtaaaatcgcgacaggactaaagaaaggagcagacgttgatacctactgagcgtcgacaaatcattcttgatatggtagcggagaaaggcatcgtcagtatcgctgaactgaccgagcgcatgcatgtatcccacatgactatccgccgtgacttacaaaaactggagcagcaaggcgcggtaatccaggtctctggcggcgtgcaatcatcgactcgcgtggcgcacgaaccctcgcatcagatcaaaaccgaactggcgacgccgcagaaagcggcaattggcaaactggccgccagcctggtacagccagaaagctgtatctaccttgatgcaggtacgaccacgctggcgattgccaggcagctggttacgatgaataaacttacggtggtgacgaatgatttcgttatcgccgattacctgatggacaatagcaattgcacaattattcacactggcggggcggtatgccgggaaaaccggtcgtgcgtcggtgaagccgcggcgacgcttttgcgcgggctgatgattgaccaggcctttatttccgcctcttcctggagcgtgcgcggtatttcaacgccggcagaagataaagtcacggtgaaacgggccgtcgccagcgccagccgccaaaaaattctggtgtgcgacgcgaccaaatacggccaggtcgcgacgtggctggcgttaccgctggcggaattcaaccaaatcgtcaccgatgacggcctgccggaaagcgcaattcgggcgctggccaaagtggatatctcactgctgatggccaaacaatagcgaagcggcgcaagccgcttacgtcatcatcttgcgtaccagttgcgtaaactgttcgcgttcttcagcgctcagtcgccccaaaaactcatcgtcaacgcgatcccccagtggtatcgcggcggtgagcaacgtttggccctgaacggtgagatagacaaaacgccgacgtttatccagcggatcgttttctcgttttaccagcccacgattttccatccggcttaacatctccgccagcgtcgctttagtgctgaccgccgcttcggtcagatcgacctgttcaatacccggatgttcagcaataacgcgcatcaccgcatattgaggtttggtgagctccggtagttcatgctgccagcgtgcggtatgttgctgaaaaagttggcgtaacagatgaaacgcggtgtttcgtaactccatgagcgctccggataaattaactttttctatcataacgacttatgcacggttttttaatgacgaatgctttagctaaacgtgcgcaggcgtcgggagcgatcttgtcgcaaaggccgtgtgggcgtattttgatcaaaatgttcgtatacgaacgatatttgaggtaagaaatgagattgattgtggggatgaccggtgcgaccggcgcgccgcttggcgtcgagctactccaggcattgcgggcgatacctgatgttgaaacgcatctggtaatgtcaaagtgggcgaaaaccactattgaactggagacgccctacacgcccgctgaggtagccgccctggcagattattgtcatagcccggccgatcaggcggcgaccatttcctccggctcatttcgtaccgacggcatgattattatcccctgcagtatgaaaacactggcgggggttcgcgccggctatgccgaggggctggtgggacgcgctgccgatgtcgtgttgaaagagggtcgcaagctggtgcttgtgccgcgggaaatgccgctcagcacgattcatctggaaaacatgcttgcgctttctcgtatgggggtggcgatagtgccgcccatgcccgcgttctacaacctgccgcaaaccgttgacgatattatccagcacatcgtagcgcgcgttctcgaccagtttggtctggagcatacgcgcacgcgccgctggcaaggactgcgacagacagcaaatttttcacaggagaatggataatggcatttgatgatttgcgcagttttttacatgcgctggatcagcagggacaactgctgaaaatcagcgaggaagtgaatgcggagccggatctcgcagccgctgccaacgcaacgggacgcatcggcgatggcgcgcccgcgctgtggtttgacaatattcgtggttttaccgacgcccgcgtggcgatgaataccatcggttcctggcagaaccatgccatctcactgggtttgccgcctaacacgccggttaaaaaacagatcgatgaatttattcgccgctgggacaattttccggtagcgccggaacggcgggcgaatccgggctgggcggaaaataccgtcgacggcgacgcgatcaacctgtttgatatcctgccgctgtttcgtctgaacgacggcgacggcggattctatctggataaagcctgtgtggtatcacgcgatccgctcgatcccgataacttcggcaagcagaatgtcggcatctaccgcatggaagttaaaggcaagcgtaagctgggtctgcaaccagtgccgatgcatgatatcgcattgcacctgcacaaagctgaagagcgcggggaagatctgccgattgcgatcacgttgggtaacgatccgatcattaccctgatgggcgcaacgccgctgaaatacgatcagtcagagtatgaaatggcaggcgcgctgcgtgaaagcccctatcctatcgccaccgcgccgctgaccggttttgatgtgccgtggggatctgaagtcattcttgaaggggtcatcgaaagccgtaaacgtgaaattgaaggaccgttcggcgaatttaccggccactattccggcggtcgcaacatgaccgtggtgcgtatcgataaggtctcttaccgcagcaaacccatttttgaatcgctctatttgggtatgccgtggacggaaatcgactacctgatggggccggcgacctgcgtgccactgtatcaacagctgaaagccgaatttccggaagtgcaggcggtaaacgccatgtacacccacggcttgctggccatcatctcgaccaaaaaacgctacggcggctttgcccgtgcggtgggcctgcgagcgatgacgacgccgcacggtctgggatatgtgaagatggtgatcatggtcgatgaagatgtcgatccattcaatctgccacaggtgatgtgggcgttgtcgtcgaaagtgaatccggcaggcgatctggtacagctaccgaatatgtccgtcctggaactggatccgggctcaagcccggcggggattaccgacaagctgatcattgacgccaccacgccggttgcgccagataaccgtggtcactatagccagccggttgttgatttaccggaaactaaagcctgggctgaaaagctgaccgccatgctggccaaccgtaaataaggagtaaccgatgatttgcccacgctgtgccgatgcacatattgaactcatggcgacttcgccggtaaaaggagtctggacggtatatcagtgtcagcattgtctgtatacctggcgcgataccgaaccgttacgccgtaccagccgcgaacactatccacaagcgtttcgcatgacgcaaaaagatattgatgacgcgccaatggtgccgagtatcccgccgctgctggcagaagacaaacggtaaaaaaaaggccagtcgacagactggcctttttttgacaagggtacttactcgcggaacagcgcttcgatattcagcccctgcgtctgcagaatttcgcgcagacggcgcaggccttcaacctgaatctgacgaacacgttcacgcgtaagaccgatttcacggcctacatcttccagtgtcgcagcttcatatcccagcagaccgaaacggcgcgccagcacttcacgctgtttggcgttcagttcgaacaaccatttgacgatgctctgtttcatatcgtcatcttgcgtggtgtcttccggaccgttctctttttcatcggccaggatgtccagcaacgctttttcggaatcaccgcccagcggggtgtctaccgaggtaatgcgctcgttgagacgaagcatacggctgacgtcatcaaccggtttatccagttgctctgcaatttcttccgcactcggttcgtggtccagtttatgcgacaactcacgtgcggtgcgcaggtatacgttcagctctttaacaatgtgaatcggcaagcgaatcgtacgggtttggttcatgatcgcccgttcgattgtctggcgaatccaccaggttgcgtatgttgagaagcggaacccgcgttccgggtcaaacttctcgactgcacggataagccccaggttgccctcttcaatcaggtccagcaacgccagtccacgattgccataacggcgggcaatttttaccaccagacgcaggttactctcaatcatgcgacggcgagaagcgacatctccacgcagtgcgcgacgcgcaaaatagacttcttcttcggctgttaacagtggtgaatacccaatctcaccaaggtaaagctgagtcgcgtccaacacacgctgtgtggccccttgcgataacagctcttcttcagccaggtcgttatcactgggttcctcttcactcaaggctttttcgtcaaaagcctctactccgttctcatcaaattccgcgtcttcatttaaatcatgaactttcagcgtattctgactcataaggtggctcctacccgtgatcccttgacggaactagcaagtcaaagcctggttccgccgctttatcgctgcggtaaataacgcagcgggtttacggatttccccttgtaacgaatttcaaaatgcaagcgtgtagagctggtgccggtgctacccatagtagcgattttttgccccgccttaacttcctgttgttcccggaccagcatcgtatcattatgggcgtaggcactcaggtaatcatcgttatgtttgatgataataagattaccgtaaccacgcagtgcgttaccggcatatacgacgcgcccatcagcggttgcgacgatagcctgtcccttactgcctgcaatgtcgatccctttattgcccccttcggaagcgccaaagttttcgatcactttgccatccgtcggccagcgccatgcggaaatcggcgcgctggttgacgtactgcttgcatttggttcggtcgtgcttaccgttggtgccgttacaggcgctgtgacaaccgtcccagcaggcttgttgtttggcaacattttgttagcactttgttcacctgagccctcagaatacgtaattgttggttgagacgcaactgcaacggtggaattttgtgcagacctggtcacaactccttgctgtgctgcatccgcctgggtgatcgcatttccgccagtaattggcgtaccggatgcgttaccaacttgcaaagtttgccctacattcaggctatacggggcagaaatactgtttctctgggccagatcgcggaaatcgttcccggtaatccaggcgatgtaaaaaagcgtatcaccctttttcacggtgtaagtactgccacccgtatagctacctttcggaatattcccatactggcgattgtatacgattcgcccattttccatctgcacgggttgttccgtgaccggttgagtttgcatgggctgcgttacaggacgctgaacgggttgaatttgcggcgcttgttgcggcgtttgttgcgtcgtcgcgcccatttttggcggcggtgtgatcaacatcccggaattggtatttgatgacgaaccactgtccacagacgtgaccggcgccggagggtttgacgaactggtacaacctgccagccatagtgaaaccagtgatagtgccgcaatgcgactaacggtgaattttgggcttcccgcgctcatttatcccccaggaaaaaatttggttaacaaccagtgacgtaagaaccgtgcaacgcattaagtgaacacgggaaaatgtgttcacgatacgcttaacccaccgggaataaccaggaaaactccaggtattcgtttcggcttcatcaggcgtaagagtgggtgtttgcagggcaaactaggccagctctcccttgactaacgggacgaagcgaacggcctccacggtatcgataataaattcgccgccccggcgacgcacgcgtttcaaaaactgctgctcatcgcccacgggcagaacaagaatgccgccttcatccaactgtgccatgagcgcggtaggaatttccggcggcgcggccgtcacaatgatagcgtcaaatggcgcacgcgcctgccagccttgccagccatcgccatgacgggtagaaacattatgtaaatcgagctgcttcaggcggcgacgcgcctgccattgcagccccttaatccgctcaacggagcaaacgtgatgtaccagatgcgccagaatcgccgtctgatagccggaaccggtaccaatttccagcaccctggattgcggcgtcagttcgagcagctccgtcattcgcgccaccatatagggctgcgaaatcgtctgaccctggcctatcggcaaagcgatattttcccaggccttatgttcaaacgcttcatcaataaatttctcgcgcggcactgcagcaagcgcattaagcacctgctcatctctgatgccctgcgcgcgcaattgttcaagaagagcctgtacacgtccacttaccattgcgtgccaactcccacgctgtctaaccagtctgaaaccacatcatgcgcgctgtgcgcggttaaatccacatgcaacggcgtgacggagacgtagccttcatccaccgccgcgaaatcggtatccggcccggcatcgtatttatcgcccggcgggccaatccagtacaatgtattaccgcgcggatcttcctgcgggattactttatccgctggatggcggctaccacagcgagtcacgcgaatgcctttaacctgcgctaacggtagatccgggacattcacgttgagaatacgcccggtacgcaacggctcccggcttaaccctcgcaaaagcgcgcaagtcacggccgcagccgtatcataatgctgatagccgttaagggagaccgctaatgccggaaagccgagatgacgaccttccatcgccgcggcgacagtaccggaatagatcacatcatcgcccagattcggacccgcgttaataccggaaacgacaatatccggacgcggacgcattaaggcattaacgcccagatagacgcaatcggtcggcgtccccatctgtacagcgatatcgccattatcaaaggtaaaagtacgaagcgaagattccagcgtgagggaattagacgcgccgctgcggttacgatccggggctacgacctgtacatcagcaaactcacgcagcgctttcgccagcgtttgtataccgggcgcgtgaaccccgtcatcgttactcagcaatatgcgcataatcacccattgtgttgatcagttcccttactacgctggtggcaaaactgcctgcgggcagccagaaacgtaactcgacggtaacgtcatcccaccagttccagcttaattgttgcggataaagcagcatcgctctgcgcgacgcctctactttttcgcgcagcaacagcgattgcaacaccgtttcctgggcaatggcatcttgctcaaacgccagcgccgcacgctgtgttccccactctccgctgcccggcaacgacgctgtaatcatcagctctttttcgtctacccggcgctgcaattcaggcagttcttcagatgtcgcgacgaaccagcttccacgccccgctaattgtagcgcatcgccgtcaacaacttgattaaagtctggtttcttcagccgctggtgaacaatttgattaaacaacgcgctacgcgccgccgacaaccaaaaactgcgtttattgcgatcgcgcaccggcgcgttactttgcgcccagcgcagcgcgccctgcaagttgctgccgccaatgccgaatcgttgtgcaccaaaatagttcggcacgccgccatcgcgaatcgcctgcaatcgtgtttcgacatcgcggcgatcgcttatttcacgcaacaccagagtaaaggcattgcctttcagcgcgcctaaacgcagcttacgcttgtgacgcgcgtattccagcactttacaaccttccaactgaaaggcgctgaaatcgggcatctctttccccggcacgcgcgcgcacagccactgctcggtaacggcgtgtttatctttttgcccggcaaagctcacttcgcgagcgtgaattttcaggaatttcgccagcgcgtcagcgacaaaacgggtattgcaaccgtttttcaaaatacgcagcaaaatgtgctcgccttcaccatccggcgtaaagcctaaatcttcaaccaccacaaaatcttccggattcgctttcagcaatccgctaccttgtggttttccgtgcagccaggtgagattgtcaaactctgtcatttcgccgccttcatcagcaacgcgaccgcttcgcaggcaatgccttctccgcgtccggtaaatccgagcttttccgtcgtcgtcgccttcacgttaacctcatccatatggcagccgagatcttcggcgataaagacgcgcatttgcggaatatgcggcagcattttcggcgcctgcgcaataatggtgacatccacgttgccgagggtgtaccccttcgcctgaatacgacgccaggcttcacgcagtagttcgcggctatccgctcccttaaatgccggatcggtatccgggaagagcttgccgatatcgccaagcgccgccgcgcccagcagcgcatcggtcagcgcatgtaacgccacatcgccatcggaatgcgccaatagccctttttcataagggatacgcacgccgccaataataatcggcccttctccgccaaacgcgtgtacgtcaaaaccgtgtccaattcgcattatgctttctcctggtggatggttcgggtcagataaaattccgccagcgccagatcttccggacgggtgaccttgatattatccgcgcgaccttctaccagcgccggatgaaaaccacaatattccagcgctgacgcttcgtcggtgatggtcgcgccttcattcagcgcacgcgtcagacaatcgtacaagagttcgcgggggaaaaactgcggggtgagcgcgtgccataaatcggcgcgctctacggtatgggcaatagcgttcttccccggttcgccgcgtttcatggtgtcgcgcaccggactggcgaggataccgccgacccggctgttttcgctgatagccagcaaccgcgcaaggtcatcctgatgcaaacagggtcttgccgcgtcgtgcaccagcacccactgcgcctttgcaacggcctgtaacccggccaaaacggaatcagcgcgttcgttgccgccatccacaacggtgatttgcggatgattcgccagcggaagttgggcaaagcgatgatcgccagggctgatagcaataacaacgcgtgtcacccgaggatgcgccagcagcgcatgaactgagtgctccagaatggttttattaccgattgagagatactgcttaggacattctgtttgcattcggcggccaaatccggccgccggcaccacggcgcaaacgtccaataaagtggctgccatgttaaatccctggatggtttatcgatgagtttgccccgccgttgccgcgcgttttgaggcgtcaggcaccagacgatagaaggtttcgcccggtttggtcatgctaagttcgttgcgcgcgcgctcctctatcgcttcctggccgccattgagatcgtcaatttcggcaaaaagctgatcgttacgcgctttaagtttggcgtttgtcgcctgctgcgcgaccacatcatcgttgacgcggctatagtcatgtatgccgttcttaccgaaccacagcgagtactgtagccagaccagtaaagccagcaacagcagcgttagtttacccatcctgccccctgaaaaacggcatcatcatcccataacgtcctctgtgactccacattcaggacgggattgccgcgacaacgccggcaaatgtaccacatttgccggatgttacgtatacccgagtaaggagaacataatctcattgttggttacggtttgaattatgaccggaggcgcagtgataacccgtctaccctaatagccatataaataacgcgccgaacagcgcgcctacggccagtagagtaaacatgatgctaaaaagtattttgccctttaccagcagatgcaacgcaatgccgataatcaccgataccggcattaacgcgaggaaaaagggccaggtatagaggaaaaaaaacagcgtgttagggccataaagcagaaaagggatccccaacgccagcagccatgacacaaagccgaccaccgcccccggaaatgcactggtggcgtcatcgtcgaccatgaaggcgtctgaccttgtgaaagtaatgttatggctattacgcatattaaatcctgtaaccttgaccataccgggcatacaagcccggtggtgtctcaggatctgataatatcgcgccgtctcagcaggtctaataattgggaaaccaaatttgttactaattgttcaccattaagatgaacctgtggcgagtcaggcgcttcgtaaatggcgtcgatgccggtaaagttacgcaactcgcccgcacgcgcttttttatacaaccctttaggatcgcgctgttcacagatagccagcggcgtattgacataaatctcgataaaacgatcgtggccgacgcgctcttttaccagttgccgctcggcgcggtgcggagaaataaatgccgtcaaaacaatcaggccggcgtccgccatcaggctggccacttcgcctacccgccggatattctcctggcgatcggcatcgctaaagcctaaatcacggcacaaaccgtggcgcacattatcaccatccaacaggtaggtactgacgccacgctgatgtaacgcctcttccagcgcgccggccaccgttgattttcccgaaccggagagtccggtaaaccacagcaccacgccacggtggccgtggagctgttcacgggcggcgacagtaacgggatgagagtgccagaccacgttctcatcatgcagcgccatgtttatctcccagcaaatctcgggcgtcccagtgcggaaaatgacggcgtaccagcgcattcagctccagctcaaacgcactgtattccacgggcggcgtcgctccgcgttcatccagttcccgcaccatgccagcgcccacggtaacgttagaaagtcggtcgataaaaatcagcccgcccgtcaccggattttgctgataaatatccagcgcgagcggctcatcgaatgtcatctccaccagaccaataccgtttaacggcagactttcgacgtctcgttgggtcagattgttgatatcaatctgatagcgaatagcctcgatacgcgcgcgggttttcttacccgcaagtttaacgtcgtagctttggcccggcgccagcggctgttccgccatccataccacgtcgatcgcagcgtgccgcgcaggtgccagcgtctcgtttgccgccagcagcagatcgccgcggctaatatcaatgtcgtcgttgagtaccagggtaatggcttcgcccgcacaggcttcttctttgtcgccatcaaaagtaacgatacgcgccacgctggattccacgccggacggcagcactttaatgcgctctccgactttgacgctaccagacgccagagtgccggcatacccccgaaaatcaagatttgggcgattaacgtattgtactggaaagcgcatcggttgacggtctaccgcacgctgtatgtctaccgtttccaggacttccaacagcgtcgggccgctgtaccagcgcatattggcgctctgcgcggcgacattatccccttccagcgccgaaagcgggacaaagcgaatgtccagatcgcccggcaactgttcagcaaaggtcaggtaatcttcacgaatacgggcgaaggtctcttcgcggtagtcaacgagatccattttgttgattgccaccaccaggtgtttgatccccaacagagtggagataaagctatggcgacgcgtctgatccagcacgcctttacgcgcgtcgatcagtaggatcgccagatcgcaggtggacgccccggtcgccatattacgagtatattgttcatggcccggcgtgtcggcgataataaattttcgtctttccgtggagaaatagcggtacgcgacgtcaatagtaatgccctgctcacgctcggcctgtagcccatctaccagcagcgccagatcgagtttttctccctgcgtgccatgacgtttactgtcattatgcagagaagagagctgatcttcataaatttgcagagtatcgtgcagcaaacgacctatcagcgtacttttaccgtcatcaacgctgccacaggttaaaaaacgcagcaggcttttgtgctgttgggcaatcatccaggcttcgacgccgccttcattggcgatttgttgtgcaagtatggtgttcatggcggctccttagaaatacccctgacgttttttaagctccatcgaccccgcctgatcgcggtcaatcatcctcccctggcgctcgctggtggtagaaaccagcatctcttcgataatttccggcagcgtttgcgcgtgggattccaccgccccggtgagcggccaacagccaagtgtacggaagcgcaccatcctttttttgatgacttcgccaggctggagatcgatacgatcgtcatccaccatcatcaacatgccgtcacgttccagaaccgggcgttcagcagccaaatacagcggcacgatgtcgatgttttccagccagatgtattgccagatatcctgctctgtccagttggagagcgggaagacgcgtatactttcgcctttattaatctgaccgttatagttacgccacaactctggccgctgatttttcgggtcccagcgatggaaacggtcacgaaaggagtaaatacgttctttcgcacgggatttttcctcatcgcgccgtgcgccgccgaacgcggcatcaaaaccgtacttattcagcgcctgctttaacccttcggttttcataatgtcggtgtgtttagcgctaccgtgaacgaacggattgatgcccatcgccacgccttccggatttttatgtaccagcaattcgcagccgtatgcgttggcggtacgatcgcgaaaggcgtacatctcacggaatttccaaccggtatcaacgtgcaatagcgggaacggcaacgtacccggataaaacgccttacgcgccagatgcagcatgacgctggagtctttaccaatggagtacagcatgaccggattagcgaattccgctgccacttcacggataatgtggatactttccgcctccagttgccgcaggtgggtgagtcgtttttgatccataaccgttcctttgcaataccgttttttgctaaacatttcgattacacgactatagggagcgcaggagagtgaatgaaatgacgaattggaatgagtagttcctcaaaggaataacgcggcccaaaaaccaatatcaaaaaatgcttaacgtaccggattgccagcatttaggagcaaatgaaattgtattaacacgatcgcggtttcatactagccacgtaaaattttgttctgtatttaaggactcattatgttttccgcaacgcgccgctttgccgtcattctggcgctcggcgtaggctttatccttcctgcacaagcagcatcaccagggcctggtgaaatagcgaatactcaggcacgacatatcgccaccttttttcccgggagaatgacgggctcccccgccgagatgttgtctgccgattatttacgccaacaatttacccagatgggataccaaagcgatattcgaacgtttaatagccgatttatttataccacgaaggataatcgcaaaaactggcataacgtgacgggcagtacggtcatcgccgcccatgaagggcgcgtgccgcaacagatcatcattatggcgcatctggatacgtacgctccgcagagcgacgctgatgtcgatgccaatctgggcggtttaacgttacagggaatggatgataatgccgcgggattaggcgttatgctggaactggcggcgcgtctgaaagatataccgacccattacgggattcgttttatcgccaccagcggggaagaagagggaaagctaggcgcggaaaatttactcaaacgaatgagtgacgctgagaagaaaaatacgctgctggtcattaatctcgataacctgattgttggcgacaagctctattttaatagcgggaaaaatacgccggaagcggtgcgtacactgacccgcgatcgggcattagcgattgcgcgccgttatggcatcgccgccaacaccaatccgggacgcaatccatcctaccccaaaggaacgggttgctgtaatgatgcggaggttttcgataaagcgggaatatctgtgctttctgttgaggcgacgaactggaatctgggtaaaaaagacggataccagcaacgcgtgaaaaatgcctccttcccgaacggtaatagctggcacgacgtacggcttgataatcaacagcatattgacaaggcgctgccagggcggattgagcgccgtagccgcgatgtagtgcggataatgctgccgttggtaaaagagctggcgaaggcggaaaaaacgtcctgatatgctggtgaaacgtgtttatccccgctggcgcggggaacatttttcagcccttgtcgactgcggaacgcccctcggtttatccccgctggcgcggggaacacgcgaaatagtggggaaaaacccctggttaacccggtttatccccgctggcgcgggaaacactaggccttgataccatcgctcgcacctcgtcacggtttatccccgctggcgcggggaacacgtttattactgcttagttaattaatgggttgccggtttatccccgctggcgcggggaacacaggcgaataatctctaatagtctcaattcgttcggtttatccccgctggcgcggggaacactaaatctggcgtcgagacattcgaaatagtgccggtttatccccgctggcgcggggaacactcttttgattttgctgcgatgttataaccagacggtttatccccgctggcgcggggaacactatccacatatacccgcaatcatattcaagaacggtttatccccgctggcgcggggaacacaatcactgcgggggtatttagcggaaacggctcggtttatccccgctggcgcggggaacacgatcgagtaacgtgcgctggaacgcgtcggcgcggggaacacaattaaagccgagggtggcaccgcgccttattcggtttatccccgctggcgcggggaacacgcacctcgaaacggttttaaaacactaccgtttcggtttatccccgctggcgcggggaacactggaccgatggggccaacatcgccgaacgtggcggtttatccccgctggcgcggggaacacgttacgttcggtaaatggaaagcggcgaatatcggtttatccccgctggcgcggggaacacccagaaagtgccggtagtgcctgatgaacgaccggtttatccccgctggcgcggggaacaccgcgcccacttccgtaaaatacagataatccacggtttatccccgctggcgcggggaacacggcagcgggcgaggcaaacacattcggggcgtcggtttatccccgctggcgcggggaacacggtaatttctcatctaacagcctgtacgcctcaggtttatccccgctggcgcggggaacacgaatctaatgcaacagatgaataaacacgtaacggtttatccccgctggcgcggggaacactctttatcgtcaatgcgaaattttccgcgacgcggtttatccccgctggcgcggggaacactcccattcaccaacaacaatatcgccctgcaacggtttatccccgctggcgcggggaacacacttccttcagtcttaacgataatccgcaacgcggtttatccccgctggcgcggggaacacgcaaaatagcgatgagctggctacgcccactggcggtttatccccgctggcgcggggaacaccagcacgaaaaattatttactgtcgttgctcacggtttatccccgctggcgcggggaacacactaaaactatatatttgttctaaaagcccttttttactacataacaaactaccaacggtaagataacaattccttattattaaagaacattcaacttattgattttcaacaggaagaaaagaaaccaaacgcagtccatccaaatctaccggaatacgtctgttttcaccccaggtctggaactcaaaaccagactcagtatttgttgcccaggccattactacgtttccgactccgccaagctgtgtgatctgttgccaaatcatttcccgaatacgcttcgaggtatcgccaacataaacacctgcacgaacctcgagtaaccagacggcaagacgtccccgcaggcgcggcggtacgttttccgtgaccacaaccaccatactcatcaaccatgcccccgatggccgctatcacccagtgattcaggttccggtattgctggcggcaacatatccggcgcaggctgaggtggttcaatttcaccggcagcgagcacctcttcgatcagtgggatcaattttccggtcagcttcgaactgcgaaaaatatcacggcaggccaggcgcacttctttatcaggttccgccgggtgacgagcagcgatctcaaatgctttgggcaccaccgattcaaatttgatgatatcggcaatgtcataaacaaaagaaagcggcttaccactatggataaaaccgatagctggcgcatatcccgccgccaggatagccgcttctgaaatcccgtacaggcacgatgtcgccgcgctaatacatcggttgacgacatcccccttctcccagtctttcggatcatagttacgaccatgccacttcacgccatactgcttcgccagcaatgcataggtcgcccgcacacgggatccttcaataccgcgcagttgctcaacggcacgacgggcgggcggcggttcgcgaaaacgcagttcatacattttgcgcaccaccttcagccgcaggtcatcatctaacgccagctttgcctgataaagcaacttatcggctcgtgcgccgccgggttgtccggaggaataaacccgcactcccgcctcgcccacccacaccaacagcgttcccaccgtcgatgccagacgcacagccgcatgggaaacccgcgttcccggttccagcatgatacaagcgaccgaaccaacgggaatatgcgtgcggattcccgttttatcgatcagcacgaatgccccatccagcacgtcaatctgaccgtactggaggaagatcattgaggttcgatcttttaacgggatcgggttgagcggcacgaacgtcacgcgtcgtctccaggtttgatcatcatcattccgcagccaaacgcccggcttttaccgaacccctgcgccagacgttgcaggaaaagcgcgggttcgttaatcaccagcacgccggtatagtccacgctgctaaactgaatcatctgccgatctttcccgcgacgtatctgctgctgccgataagcatcaacgctcgcctcgcgcagagtaaagccattttgctccccctggcgcgccaaccacgtcagcgccgcctgctgctgataagaccaaatatcctggctatcaccctgcgttttacgctggcgtttcgcctccatcagcaaatcgtgacgcttgccgtttttgcaaaccgtcggattggcgcgcaggttaaaccgcagcgtctgccccgcgctcagcgttggcgcaaatgggcgagtctgcacgtcaaaaatcgcgctggcggcaggctgttcctgtgagagaacaaaaaagcgaaacgcgccctgtaactcttcgcggcgataaagaaactgccgttccttgctgccgggaaagagatcccataaccactggtgcatcacgtactcgccgcgctccaccagatgcaagagctgtgccggcgaaagctcgctggtgtgcagcgttattcttgagagatacacgcgtcctccttgcggagccacggcccctgattcacgctacgttcaccgaacagccattgctggcggctcaacggcatgtcgcgacgacgtaaaattttgctcgccgttaagccatcgtgttcaccttcccaccagcattcgttctgtaatctggggagaggcagtttcagcgcattgaattgatcctgataccaacgatatgcttcacgcaggacacccgccgcactcccttccagcagttgcggcgcaagcggcaacgccagagggtgacttttgcgccccagatacagcgggaatacaggatgttgtagcgacgtctgaagctgcgccaacgtgtaaggcgcgtccggcgtcgcgctgacagcgatcatccaccaggcgtcggtgtagtagtcgcgtcgggaaatcagcgcgctcagtaattcaggatcctgcaactcttcacggcggctgaagtaacgtgccttacgtacctctttcggcatctgcaccgtgtgataatcccgcgcccagcgcgggttgccactggcgcacagcaaaaattggtaatgacgattgaaggcgtttagccgttcctcctcatcgcggcgaattcccagcgccgcagctaataaccccaacagcgccgagcgcgagggtagctcatggctgtggcgcacttcgcctggcgcatccacgccccaggaggccatcggcccgtgaagctgaaaaaccagatattggctcataagccgccccttacgcgcagatgaagtcaagcacgtcttccatgcttccctgctgattcatcacgtcgaaactggcggtatcagtccgctggccataaaccttattcatattcttatgcagcgatgtaatacgcttaaccgcaacgttcaattggtctgtaccgttgatcggttcataaaacgcggccgccagtgaacgtggttggtcggtgcctttttcggccagcgcccacgaggcataggcacggctggcaaagctgttctgtttgccggtcggcgacactttcagcgccgcttcagtaaaggcgcgcagcgttttgtttgccagttcttcattgtcgttcaggtttttcaccagcagatctttgtcgatgcagatataggtgtaaaacagcgcggagccaaagccggtttcgccgagatggcctgcgcctgcatcttctgccgatgcctggcgtaggtcatccacagcggtaaagaaatcgtcttcgatgatcgtttcgctgacgccgaaggcgtgggcgacctggcaggcggcttccacgttaaaatcagttttcttcgctaacatccggccaaacatggcaatatcgacggccatgcgatcgtgacgtaacagttctgcttcctcttctgttgccggacgtttttcttctgccagacggcgcgccagcgctttcacggcctcaaactcagcagggctgatatgcaccagttgctcggtttcagcattcgtcaactcatctttgggtttcttatcctcttttaccttgccaaagcagttggcgatgttcttgacgtactcaaccgcttttttggcgtcaatgccgctatcaacgaggatttgcgccgcctcacgagcaatgcgaccagtacgaataccaatatggccagctaatgcctgttcaaataactcagatgtacgccaggcgcgtttcaggctctgagaggagatacgcagacgtgttgctccgccaagcaccacggtttttggcgcaccggtatcatcacggttcaggttagcggcggggtaagcggtcagtaaatggagctgaataaacgttgtcataaagatatccctgttaatcttgttcgttatcggtatcgccatcgccggcctggtagtattccagcgcccagcggatacgaagaaattcggttggccgctgctggcggcgatggtggttcagcaagtcattctgctcctggcaccagcagaaaatatcgtctgcaagagaaaacaggttgaccgaaccatctaacagcttcaccgcacgccgtaactggcgcagcagttcatccggcgtttttaccgctaataggtgggagaagcgtaattttgacatcaccggagtgtcgccacctttcttctgtccaagctgcgcagcaaaactcttttgctcatcaataaatttgatatgtgcagccagtgccgctgtgattgccaatgcagtaacattccagggtgctttgtttttccataaagaatgtgtttgcattaacaatgaatgaagcccctcagccaaacaggcatcattcaccgttttactacgtcgtaagctggcacgtaatccacgtttttcttgtagttcctcatgccactgacgcaaagtggctttatcatctttcgtcacaacactcattcagcagcctcctgtttctttgctttggcggcttttgcactttgtttttccgccgatgtcgtaaaatatttcttgcgcgcggtcatgatgcgttccagatcgctgctctcgtaggggttggtaaagacgtgatcatcgaagtaatgacgggtaaacagccaaagttctctttgccatttattcagcctttcgtccggcttgtggccgttttccagatcgtgaatcaggttgagaaaacgtccctgcgtcaggttccagaaatcaatgtcgataaaactgaaatcaccgcgagcacccttcgcatcggcaaaccaggcctctttgagcgcgctgcgaagcaggctcaacaggcgggccgcagtttgcacggccttacgtaaatcagggatcagaccttccgtcatcagcaacgggaagtgatgctcataccagcagcggattttcatattgtcgaaatccgcgccaaagccccagatccccgctttaacgtcagtcagcgagcgggcgttaaacaccttgactacctgcgcgggagattcgtaattcgcttccgtctggttgttctgacttaatcccagccagtcgcgccagataaggccgccgggctgcggtttaacggaaaagaaggcgttttgatcttttaccggggcgcgataaggcgtcagcgggtgccgccagccatcgtagttaacgccgtagttcttgacggtcataaagccaagaagctcatcgctttcagcgccgcaaatatcgcagcaacctgactgtaaggtggcaaaatccaggcggatacgacgcggcatcccccagtacgcctggagtttattgacctgctccggcgtggtaacggcattcgcctgctcgctggtccgcgtcgcggcaagccacgggaaaacggtcgcatcacactggtctggtaaaggcagatccgcagtatcctgcggcatcacgttgagccacagcttgcgccagagcggcgtttgccgctcgccctgatattcctgcaattcaaccagcgtggtcagtggcccgccgccgcgcagcccggtacgatagcctttgccgcccgcaggcgcgttaagctgcaacgagaacagcgccagcgccgcgcagtgcggacaaaaacgttccgttacgccgcgtttgacaaaatgatctttattgaacttcgtggtttgcgcgccaggtatttccggcaacaatgaggcaatagagactttttcgccgcttaacggttcaaaatcctgcataaaagacggcgtttccgcgccaaactgaaaagcgtgttctaacggtgctaatgccttatggagcacatcggcatgcaatccatcaaaccagatatcctcccaatttttgtatcttttcggcgcgatactgcattgcagcaatcccaacagaaactgccaagccgctccctgtaaatctgctcgcgttgcggcgatgtccaccacgttttcatccgccagatcgacgggggccagcttgcccgtggaaccgtctttgaaacggacggggagccagggcgttgttaaaagtgaaaaattgtccatatctgtattcgttattcccccatcatgccaatcaatccctcattcgccgaataaccacaagcggcaaagtccgtcaccacaatcaccgtggcaaaatccttatcctgatgctgttgcgcacaccacttacgcaagggttcgccgtctaatttttcaaactcgtctttatgtttattccaccagctctgacgtactcgcagcacgctcatctcccaggcgtgttcaccgctggcataaggggttacgacgctatccacgattttcgccagccacagcgtgacagactcttccgccagccgcgttgacattttctccggtaaagaatcgctaatttcagcacagtagcccggcgcaaagttaagcagcatctggccggcaaatgcccggtcgcaataaaatttgccttcctgcaattgctcggtttttgcaaatccaaccggcatgttgacatcctcgccgtagaccgactcaatcaacaatcgggcagattgcggcatccgaatcgtcccctgctcacgtaatatgcgctgtgtcagccacatgcgcccatgatcgggatagacataggcgctgttacgcatggcgctggataaccagttctctcgcggcgcgtcatcccactccggagcaagaatgcgcagcactggcgtctctcgctcatcctgcccactctttttcaccagaccgttacgatcgcgaatatgacgctgtagtcgaccggcccgctgaattaataaatccaccggcgctaaatcagagatcatctcatcgcagtcaatatccagactttgttcgatgacctgcgtggcgataatgaccttaccggcacgttgcgcgccgctctgtttgccaaagagattcagcgtctgtgactcaatccgctgacgatcgtaaaaagcaaagcgactatggaagagtaaaaggttttccgtgacgacgaccttactcagttgaagctggcgatagatacgaatcgcatcatcaacggagttacgtatccaggcgatacagtttcctttttccactgcttcacctatacgttcaagacacgcctcttcactatgtagccagccaatatctacgcaacgctcaacctctttgcgtgtatcaacccgctgagaaatcagctctgtttgtgtgacctgagtcagccagggataatcgtcatggcctagcaacggcgcctgcacactacgcctcaccccacgggaaaatgccgccaccagcttatctcgctgctgctgcgatagcgtcgcagataacagaatagtggcgttgccattactggcctgccgttcgatcaaaccttcaagtattcgggacatccaggcatcacaggcatggatctcatcagccagtaagatcttgttgctaagacccagtaaccgcaggttgttatgtttaaatggcattaccgccatcatcgcctgatccaacgtgcctacgccaacctccgccaacaacgcttttttattgctgtcggcaaaccaggcggcgcatccctgactataaggctgcgcttcatcgggttcttccgtaccagaaagagtgaccgaccatattgactgattgaaacgatccattaagcgacgcgcgctatgcgccagaatcaggctgggacgggagtccggctgatacagcgccagccaggtgttcgccatacgttcaaacatcgcgttggctgtcgccattgtcggcagtccaaaatagagtccctgcgctttacctgccgccatcagtcgatgagctaatatgagcgccgcctctgtttttccggccccggtgacatcttcaagaataaagagttgggcgccatccacgttgatatccagctcaagcgccttttgttgtaacggtgtgggatgctgaataaaagggaaaagcgtttctatgcccgtaaaggcagacacattcgccgctgagggaaatagcgtgatggcagtttgtgctttagcgagagcttgctgccagtaggtatcaacaggcattttttccgcagtacgcggaaaataacggctggcagaaccagtccagtcagccagtacaaccgcagcggaaataaaccaggaaagttgctgaaattggtcgataccctcatcttcatcccaggcttcaggcaaagtaattaaaggaaagagcgcttttattctcagaagaaaatctcttgccgcgtctttatcctgctggcgaaaatggtccagctcctggattgcctctggagggcgtccatgatgacctgtagtgactggcatccaaagcgccataacgcgcttacttttacgaactgaaagcgaagaaggaggaaacaattcagggcattcacttagccaggagttccacaacatgtatcccagcgtggtatgcgcgattttttcataatgccgtgtaggctcattaaagatatttaaagcctcatgacggtatagttgctggaaggaatgagcaaactttccaatatcatgccaacataaaatccaggcaaaaaattgcgccgcctgctccttatcctggatgcctaatttttttagatagtggtcaataaaataaatattatttatcaccatccagtaacccacagccgcaacatctaaagaatgccagcaaagcaaatggtaatcatcaccgccgtcagtttctcctcgtcgagactttccccaatagtgatatatcgacacgtaaactccagcatgtggataataaaagcactctacgcctttttaatggtcttttttgttgatatacctcacaaaaattgcacttcctgagattatatttaaatatgcccgctcaattttatatattcttcagaaatatttaccccacgaataattattataaatttttccgcctttttcttctggaagaagcgctcaaagaggcttcctccaatgccttctgcataaaccaaaatttaaaaaaaacgaccatttgcggcgaatcatctaccttttgtctgaattatcgtcaccacaaaggattaccaaccataaatgtgctgtattaataatgtcgttcaaattctctcctgtagtaaactttatctgtttaataaaaaagagagaattgaacgatatattttactccggatattgaataatataaatttgaaggaaaatattatgccagtcactttaagcttcggtaatcatcaaaattatacgcttaatgaaagtcggcttgctcatctgttaagcgcagataaagaaaaagcaatccatatggggggttgggataaagtccaggatcattttagagcggaaaaaaaggaccatgcgctggaagtgttacactccatcattcacgggcagggccgtggtgaacctggagagatggaagttaacgtagaggatataaataaaatttacgcctttaaacggctacaacatctggcctgcccggctcatcaagatctgtttactatcaagatggacgcttctcagacacaatttttacttatggtcggcgacacggtgatcagccaaagcaatattaaggacatccttaatatatcagatgatgcagtgatagaatctatgagtagagaggagagacaattatttttacaaatatgtgaggtgattggttcgaagatgacctggcacccggaattacttcaggagtcgatttcaactctacgaaaagaagtgacgggaaatgcacaaatcaaaacggcggtttatgagatgatgcgtcccgcagaggctccagaccacccgcttgtcgaatggcaggactcacttactgcagatgaaaaatcaatgctggcctgtattaatgccggtaactttgagcctacgactcagttttgcaaaataggttatcaggaggtacaaggtgaagtcgcttttagcatgatgcatccgtgcatctcctatttactacatagctattcaccgttttcagagtttaaaccaacaaattctggttttttaaaaaaacttaatcaggattataacgactatcatgcaaaaaaaatgtttattgatgtaattcttgaaaaactatatctaacccatgaacgttctttgcacattggtaaagatgggtgcagtcgtaatatattactgacataaagatagtcagtaatataaccaatttaaaatccggctgcctgccggatttttcatagcagcaagtataatcataccgcgtaaggacaattacccttcatgcagcccgcactcgcgcttcagcccgaagaagcgtgtctcttcttccgccatacccggctcccatttgcgggtggtgtgcgtatcgcccaccgacagatagccctgatcccacagcggatggtatttcaggccatgcttttgcaggtactggtaaacggtgcgattatcccagtcgataatcggtagcactttaaacacgccgcgctggatagcgagaacgggtaaatgcgcgcggctgccggactgctcgcgacgcagacccgcaaaccacgtctgcgctttcagctcttttagcgcccggttcatcggctcgactttgttgatctcattgtatttctcaatgccctcaacgccctgctcccacagcttgccgtagcgcgcttcctgccaggccggactttcgcccgcgcggtaaactttcaggttgagtttgagtttgtccgttagctcatcaataaactggtaggtttccgggaacaaatagccggtatcggtgaggatcaccgggatatccgggcgaatctggttcaccaggtgcaggctcaccgccgcctggatgccaaagcttgaggagagcacgtattcgccgggcagattttccagcgcccaggccacgcgttcttcggcgctcagtttttccagttgggcgttggtttccgccagagccattacgcgatcgacttttggcaattcattcaatgcgttgagatcgagttgggacatgagttcctcactgtttgccttgcctgatggcgctgtgcttatcaggcctacacagacgccatccggcaattcaggttattcccagaaatcacgcgcgggatcgagcaccgggcgaatgatgcccgcacgcaccgtaaagtcgccgaagccttcacccgcttcacgctctttcgcccagcgcccaatcagttcatccagcgaggccagaatatccggctcggcgatattttctttatacatccgtgggatacgactcccgatgcggttgccaccaagatgcaggttataacgaccaggcgctttccctactaagccaatttccgccagcatcgcgcggccacagccgttcgggcagccggtcacgcgcatcacgatatgctcatcaggaatgccgtgtttttccagaatcgcttccactttgtccgtgaacgacggcaggaaacgctcggcttccgccattgccagcgggcaggttgggaacgacacgcaggccattgagttttcacgctgcggtttcaccgcattcatcaacccgtggtcgcgcgccagcgtctcgatcttcgctttctggctttccggcacgctggcaataatcaggttctggttagcggtgatacggaactcgccctgatgaatcttcgcgatctccagcaggccggttttcagcggacgccccggataatccaggatacggccgttctcaataaacagcgtcaggtgccatttatcatcaatgcctttcacccagccaatcctgtcgccacgcccggtaaactcatacgggcggatcggctcaaatttgatccccgcgcgacgctcgacttccgctttaaatgtctccagtcccacgcgctcaagggtgtatttggttttggcatttttcctgtcggtacggttaccccagtcgcgctgcgtcgtcactaccgcttcggccaccgccagggtgtgctccagcggcagatagccaaactcgctggccgtacgagcgtaggttttcttattaccatgctcaatagacagaccgccgcccaccagcaggttaaagccgaccagcttgccgttctcggcaatcgccacaaagttcatgtcgttggcgtgcagatcgatatcattttgcggcgggatcaccaccgtggttttaaatttacgcggcagataggtctgcccgaggatcggttcttcatcggtggtcgcgaccttctcctgatcgagccagatctccgcatacgcacgggtgcgcggcagcagatgttcggagatcttcttcgcccattcgtaggcttcagcatgcagctgagactcgtacgggttagaggtacacagcacgttacggttcatgtcgttggcggttgccagcgcatccagccccaccgagtgcagcatctggtgcaccggcttaacgttcttcttcagaatgccgtggaactggaaggtctggcggttggtcagacggatactgccgtaaatcgtgttatccgccgcgaatttatcgatcgcctgccattgcgtcgtagtaatcaccccgcccggcaggcggcagcgcagcagcatcgcgtggcgcggctccagcttctgcgccgcacgctcggcgcgaatatcgcggtcatcctgctgatacatgccatgaaagcgtatcagcaggaagttatcgcctttaaaaccgccggtgagaccgtcgttcagatcttccgcaatggtgccgcgcagatagttgctttccagcttcatgcgctcggcatcggacagtttaccttcgaccaccagtgggcctggatgtttttcgctcattagtagacatctcgctgataacggcgctctacgcgcagctcacttaaatattcatctgccgattcgaggtccataccgccgaattcagcgatcacttccagcaatgctttttcgacatctgcggccatgcgcctggcgtcgccgcagacataaatatgcgcgccatcattgatccagcgccacagctcggcgccctgttcacgcagcttgtcttgtacgtaaattttttctttttgatcgcgtgaccaggcgagatcgatacggcttaacaccccctctttcacgtagcgctgccactccacctgatagaggaaatcttcggtaaagtgcgggttgccgaagaacaaccagttcttaccttccaccccttccgccgcgcgctgttgcataaaggagcggaacggcgcgatgccggtaccggggccaatcatgatcaccggcgtttccgggttagctggcaggcggaagttatcgttatgctcaataaagacgcgaacttcgccctcttcttccacgcggtcggcgaggaagctggaagcgccaccggcgcgggcgcggccttcaatgtcataacgaaccacgccaacggtgatatgcacttcgctctccacttcagcctgtgcggaggcgatggagtacagacgcggcgttagcggacgcagcaggtcgattagcgcctgagcatccagctgtgccggagagaaacgcaccatatcaacaatgggcgtggtcgcggcgtaatgctggagctgcgctttgtcgcccactaatggcaacagcgactcactgcgcgtcagggtcgcgtagttctcaacaatgttggcggtattcaccgtcagctcgaagtgccactccagcgcttcggcgagcggcagggttttaccgtcaaccgtcaccggctcatcgcccttcagccacagcaactcaaccagctccttcaccagagccggatcgttctgataccagacgcccagcgcatcgcccggctgatagcgcaggccggagtcgcctaaatcaatctcaatatgacgcacatctttttccgagttgcgaccggtgattttctgattcacggagagggtcgcgatcagcggcgcgtctttagtataggggctggtgtggatgtcgtttaccgcgccagtagcgacggattgcgaaggtgccgcgacaggtgcgcgagacttcagaacatcaaccacgcgggcgcgccattcgctggcagctgcctgatattcaacgtcagcatcgacacggtcgagcagacgttcaccgcccagttccgccagtttgctgtcgaaatcttttccggactggcagaaaaattcataagaggtgtcgccgaggctaaacacggcaaaagcggtgttttccagtttcggcgcttttttggagaacaggaatttatgcagcgcgacggcctcttccggcggctcgccttctccctgggtggacgtcactatcaccaacagtttttcactggcaatctgtttgaatttgtagtcgccggcgttcaccagtgtcacattaaggttggccgccagcagatcatcacgcagcgcttccgccacacgacgcgcattgccggtttgcgaagcggagataagcgtaacccgcggcatcttccgctcaggaacaggcgtgacggcaacagcgcctgagcgcgggttcagtacgccccaaaaatagccggagacccaggcaagctgttcgggagtaaggtcggttgtcgcggcctgaaggcgcgccagttgctccggattaagcggaagcaacccagtcagtggagccggtgtcgtcatgcgtcgttatgttccagtaagcaaagcggatctatacacaaaatcattcaagttcgccgtaagctgatcgcgccccaggagcgtacataaatacgtgactggggtgagtaaacgcagtcaacacagatgcggcttgaaagatgaaatgtataagcgataaatcccaaactgaggataaggttaacggtgagaggaataacaattaaagaagggttggaaataacaaataaccaaatgaactaacctgttttagttatcgttattaacgccaaaatcgattttataattgattgataattattaaattttctggaaattcttaaattaattgcccgtcacaaggcggagaatggttttagttaatgataaaaaatgcgctttccggtaccctacggcggtttttttattgcctgagagttcatcatgtccaccacgttgtataaagatttcacctttgaagccgctcaccgcctgcctcacgtgcctgaagggcataagtgcggccgcctgcacggacactcgtttatggtgcgtctcgaaattaccggtgaagtcgatccgcataccggttggattatggatttcgcggatctcaaagcggcgtttaaaccgacttacgatcgtcttgatcactactatctgaatgatattccagggctgtccaatcccaccagcgaagtgctggcaaaatggatttgggatcaggttaagcccgtcgtgccgctactgagcgccgtgatggtgaaagagacctgtacagccggctgcgtctatcgcggcgaataaggtttattaacgcgtgggctggatgtcaaattgattccagcctatccacacgacgtttcatcagtgaaaacagtccagcgcgtggtgttaaaagcgcagtacatcaccggttgcaggtgcggttatttccggtagccacaaccgcccccaggcccctgtacagtgacaaccgcatagtttttcaggtttatgttcttgcagaaagcgcctgactcgccacagcgtgaacggtgatgcgcagcggagatgaaatccgccgacaagcgcgtaaatccgctttataccagtaatattctgacagtgccggacaatatttgcgatcccccgatgcccgcatcccgtaatgatgactaatccttttgtcgattggtaaatcagtacgccctcatccaaaatagagtccggctccgcatcgtggccgccaaaaatgccgtaggcttcaggcgcgaccaccggtatttcccctgaccagataaagttttcgccaatcggcagggggtcacgcgtgtacatcattcgatagcgtgaatagtccacctcacacgacaatttttttatttttcgggtaataccaagaaaagtcattgctgcataacgttcacgtgcaatatcgggatggcagatgattcgactgctatcaggaagccacggcacgccgccgcaatgatcgtaatgaccatgcgaaagcaccacagcagacacatcggacaggtcgatccccatcgccaacgcgttttgcataaaactgccatcagggccggtatcgaacaagatagacgtagactcatcctcgaccaacaggcttaaccctggccggaccttcaacgatttatccgctccagctcccttatgattttcgagcaataccctgatccttaacgccatggccttctcctgtctaaaagcctccccgggaaaacgcggcctttttactttacaggtttgtagctgccattactggtacacagattatgattatgcaacggctatccttgttggcgcggggaacacatcttcatattgcgtgacgctgccgatgaacgcggtttatccccgctggcgcggggaacactctttatcagctaaccatttccagaactcgtccggtttatccctgctggcgcggggaacactataatatgaattaatttttgcgcataacctgcggtttatccccgctggcgcggggaacactgcccgttctgcctcttcgcactctcgatcaacggtttatccccgctggcgcggggaacactgcgtaatgggctacctgaacttcacatatcccggtttatccccgctagcgcggggaacatattaagcgcgcaaagtttgggttaattggacacggtttatccccgctggcgcggggaacaccgtattcgtcacacagccccgtccagaaatgacggtttatccccgctggcacggggaacactaacgaactgaataaaatgtcagaaagtgacgcggcttatccccgctggcgcggggaacacgcagcttagcgacgaaattaaaaccgaactcaccggtttatccccgctggcgcggggaacactgccagtgactacagaagcgtctctatcggggcggtttatccccgctggcgcggggaacacaccgataaacaaccgcatagcctctttcgtttcgatttatccctgctggcgcggggaacactgctcaataacgtcgtaaatagcgtaagctggcggtttatccccgctggcgcggggaacactatttcgccttcggcactgacgtcaccgtcaacggtttatccccgctggcgcggggaacacgtcgcgttcgttgccggtatagaccagcgtcacggtttatccccgctggcgcggggaacacatcgaatcgaaaccccagccacagaaataattcggtttatccccgctggcgcggggaacacatcgaatcgaaaccccagccacagaaataattcggtttatccccgctggcgcggggaacacgctcatgtcaaacgccatcagcgttccggcatcggtttatccccgctagcgcggggaacacaatcgccagcctcggaaatattccatcctccgcggtttatccccgctggcgcggggaacacaggaactaaacagcctgaccgttgaggatctgcggtttatccccgctggcgcggggaacacaccggacaaatcttttttttcctgttcctgttcggtttatccccgctggcgcggggaacacgggcactatgaacggatcggcgctgatgccggcggtttatccccgctggcgcggggaacacggtaaagccacaccattttttattgacctcgccggtttatccccgctggcgcggggaacacctaggaggcgtaatgaatactacgtatcaaaacggtttatccccgctggcgcggggaacacgtggtggcctcaaataaattcgagcgctggagcggtttatccccgctggcgcggggaacacgaaacgtaaacagggtaagatacaactctgcacggtttatccccgctggcgcggggaacactgtaaagggtggtctggaaggggatcggcaaacggtttatccccgctggcgcggggaacacactaaacggatataattgtttataaactactttttgtcagcaccacattctaccaacataatcgcaacaatttaaattattaaagaacagctaatttgctgattttgatgcaaaaaagttcatagaatgattttttctttaaatttaccaaaatagcgtgatccgtgcatcgctatggaaaaatttatcagcgcttttatacactcatcgaaattcacatagagaaaataaacaatgcaaggtaatggatgagtcacagacggcatcggcaggccgtctgtaagattagtaatgcatcaggcgatatttaaatatttatgcgtttgcatagacagccgccagttacgtgcaatacacgtttcaatacacagacgcgtcgcgtcttctttctggctaatgggctgcaaagcaatcacacgcggtttatcatcgctcaacgtggctaacagttcatccagcgcctcaatatcacgaactcgcccaacgggatgcttgatttcattggcgcgctccagcgcctgggaaagcacgtcatatcccccgcgcatattcacttttggtgaaaccgtgacccaggtgttaggcgtacagcgcacttcgtgcgtcccgctggtttcaatctgacaactaaaaccactcttttcaagcagatcggtgagcggcatgaggtcgtgaatacagggttcgccaccggtgatgacaacgtgacgcgcggtatagccctgacgattaattactgccagcaagtcttcactgctcgcagcaccccatttgtcgctctctttggtttttgccagaatgctgaacagagacacttcccgatcgctcagtttatcccaggtatgcttagtatcacaccaggcacagccgaccggacatccctgtaaacgaataaaaatagcggggacgccggtaaaataaccctcgccttgtagggtctggaacatctcgttaatcgggtactgcatagcgttctctattaaggggataatcgttaattattgcagatttcgtctgcccggtcatgcacagcggctgcgctattgaacagatacaaaaaaacccgccgaagcgggtttatacgttaagaggtaaaagcaggattacgcctggcctttgatctctttacgaccgttatacggtgctttttcgcccagagcttcttcgatacgaatcagctggttgtatttagcaacacggtcagaacggctcatagaaccggttttgatctggcctgcagcggtaccaacagccaggtcagcgatggtagcgtcttcagtttcgccagaacggtgagagatgacagcagtatagccagcgtctttcgccatcttgattgcagccagagtttcggtcagagaaccgatctggttgaatttgatcaggatggagttagcgatgcctttctcgatgccttctttcaggattttggtgttggttacgaacaggtcgtcaccaaccagctggattttgtcgcccagtactttggtctggtatgcaaaaccgtcccagtcagactcgtccagaccatcttcgatggaaacgatcgggtactgtttggtcagttcttccaggaagtgggtgaattcttcggaggtgaacgctttgttgccttcgccagccagaacgtatttaccgtctttgtagaattcagatgctgcgcagtccatcgccagggtgatgtctttacccagctcgtaaccagccgctttaaccgcttcagcgataacagccagcgcttcagcgttggaacccaggttcggcgcatagccgccttcgtcacccacagcggtgttcatgcctttgcctttcagcacttttgccaggtgatggaaaacttcagaacccatacggatggcttctttaaccgttttcgcgccaaccggctggatcatgaattcctggatgtcgacgttgttgtcagcgtgctcgccgccgttgatgatgttcatcatcggaaccggcatggagtatttgcccggcgtgccattcagttcagcaatgtgctcgtacagcggcatacctttagcggcagcagcagctttggcgttagccagagagacagccagaatggcgtttgcaccgaagttagatttgttttcagtaccgtccaggtcgatcatgattttgtcgatgccagcctggtctttagcgtctttgccaagaatagcctgagcgatcgggccgttaaccgcgccaacagctttggttacgcctttacccaggaaacgggatttgtcgccatcgcgcagttccagcgcttcgcgggaaccagtagaagcacctgacggagccgccgccatacctacgaaaccaccttccaggtgtacttcagcttcaacagtcgggttaccacgggagtcgatgatttcacgaccgatgactttaacgattttggacattaggttttcctcaagtcactagttaaactaaaacttcagacaaacggtgcaccgctgagggtgcaccgccgttctaacttttttacttcgcctgacgtttctgatgctcgttggcggctttaacaaagccagcgaacaacggatgtccatcacgcggcgtggaagtaaattccggatggaactgacaggccacgaaccacggatgattcggtacctcaatgatctcgactaactgatcatcaccggaacggcctgcgacacgcagacccgctgcttcaatttgtttcaacaacatattgttgacttcgtaacgatggcgatgacgttcaacaatcgtcgacgcgccgtacaactgacgtaccagactgtcatcgctaagctggcactgctgcgcgcccaggcgcatggtgccgcccagatcgcttttctcgctacggacttcaacgttaccgtcttcatcgcgccactcggtaattaacgccacaaccgggtacttacagtctggcacaaattccgttgagttggcgttgtccatgccggccacgttacgagcgaactcaatcaacgcaacctgcatccccaagcaaatgcccagataaggaatattgttttcacgcgcatagcgcgcagtggcgattttaccttcaacgccacgatagccgaagccgccggggatcaggatagcgtccaaatctttcagaatttcgacgccgcgcgtttcaacatcttgcgaatcgatcaatttgatgttgacggtaacgcggtttttcagaccaccgtgtttcagcgcttcgatcaccgacttataggcatccggcagttcaatatatttgccgaccatgccgatagtcacttcgcctgccgggttcgcttcttcgtaaatgacctgttcccattcagacaggttagcttccggacagttcaagctgaatcgtttacaaatataatcatcaagcccctgagatttcaacaggcccggaattttataaatggaatcgacatctttcattgaaataacggctttttccggcacattacagaacaatgcaatttttgcacgctcgttggcaggaaccgcgcgatcggaacgacaaatcagaatatcgggctgaataccgatagacagcagctctttcacggagtgctgagtcggtttagttttcacttcgcccgcagccgccaggtaaggtaccagcgtcaggtgcataaacagcgcgtgttcacgaccgatatctaccgccaattgacgaatcgcctcaagaaacggcagcgattcgatatcaccgacggtaccgccgatttccaccagtaccacatcgtggccttcgccaccttccagcacgcgctctttaatcgcgttagtgatgtgagggatgacctgtacggttgcgcccagatagtcgccacggcgttctttacgcagaacgtcggagtagatgcggccagtcgtgaagttgttgcggcgagacatcttggtgcggatgaaacgctcgtagtgccccaggtccaggtcggtttcagcgccgtcttcagtaacgaacacttccccgtgttggattgggctcatagtacccggatcgacgttgatgtacggatccagtttcatgatggtcacgttgagaccacgggcttccagaatggctgcgagggaggctgcggcaatgcctttacccagagaggatacgaccccgccggtcacaaaaatatagttcgttgtcatgcggaacctgagaagttaggtttaaaagacgatggaataaccaggacgggaaagcagtatacccgaacatgacctacgccacaaactttcattattcctcctcttcgtcaggctgacattcacacagggagggagaaaatagcccctttgaggtaaatgtttttgacgtaaatcaagcgcttgttatttaaaaaatcacacaaatcgctcttgaccgcctaaaacctttagagatcaatttcctggcgttttacttcctgccaaacttcttccattgtttccaggtccaccccggtcatttccaggcctctggctgcgacaatacgttcaacttcgcgaaaacgacgttcaaatttatcgttcgctttttgcaaagcgagctccgctttcgtacctaaatgacgcgccatgttgaccgtggcaaagagcaaatcgcccatttcctcttccagtttagcctgatcaacaaccgcctgccgcgcctcgaacatcacctcatcgatctcttcatagaccttatcgacgaccggtcccagcgtcgtccagtcaaagcccacgtttgaacaccgtttctggattttttgcgcgcgcattaaggccgggaagctgcgcggaatatcgtccagcgcggaatgctgcgctttttgcgcgcgctcttccgttttgatttgctcccagcgaactaatgcttcttcgctattatccgcggaaagctcgccaaaaacatgcggatggcggcgctccagcttgtcgctgatggcagcgcagatatcattaaaatcgaagcggccttcttcctgcgccatctgcgcgtaaaacaccacctggaacaacaggtcgcccagttcgccgcgcaaatcgtcaaaatcctcacgcgcaatcgcatccagtacttcataggtttcttccagcgtataaggcgcgatgctggcgaaggtctgctctttatcccacgggcagccgttttccgggtcgcgcaggcgctgcatgagggtgagaagacggtcaatttgatggttagttgtcatggtttttaatcggttgtaaataccagcgacaattgtaacgtattattcttaaccattcacgcacagagacactacgacaacgcctatataataaaatatattgttaacaggtgttgaatgctacctttcccgtataactttaaaattattaatcgatacacaacaatataataatcatataactaatttattaaaaaaacagatatttgcaccagacgttataaataacatcaattaagtaaaaaaatcatgcaaacactataagcaccccacccaaagagccttccctttcaaaaaaaaataaattatttcacttttacggaaaaacgagtagcatgcacgccagtttaatattcaaaaaagaccgcttttttgttttttctggaacatacatgaaataaatatattgaaagtattacatataatattctatgagcaggtacgatcattcagctcataagaatatactcatagaaatgtagaaatataatatttttattatgacctatttttacccaaagcccgcagcatggctctatgccgcatatcccttggtatacgcgtacaaaatgttgccataaaacacgttaattaaggataacacgatgaagtcatctcatttttgtaaactggcagtaactgcatctttagttatgggaattgtctccggcgctcaagccgcgggtagcaacacagcaaaggtcactttccttggtaatattgttgattccccctgctctctcacacttgttttttagataaaaaggctataaccaatttacatgcttaccagcatcctgattctggctcagaatacgtatcacgataacttccgtaactgattgtataaaatagataatatgccttttaaacggtaaggcataaatgtattcacccagttcaggtcgaggcgtgccaatgttattggcactcataatgctgaatatttctgatagatgattaatatatcgatcggcctgtatttcgccaaaatgctgccagccgtaatgccagatattttccagatcttcactggcctttggcgttaattttaccattctcatcgggtttgatcatccctgttttgaccttccgtaaaaaggcatccttttcccaggcctgcggctctccgctgttcagaccttcagccagaagttcacgtaacgcctgaagtcgtgactcggcctgtttttccctcagcagacgaagagactctctgatcacttcactttgtgttctgtaatcacctgattctatgagcgattcaataaactcgcgcagttcatcgccaagatcaacggtcattgttctggccataacagcctccactgtaagtataaatcttacataagagtacaccggaaatgaaatgtacgtcaaaaacataccccatatctcatgcttatggggttgctaatgcggctttgctgaacgagtagcaaagccgctacatgattactgtctggggtttaccccccgtgcagtcgccgtgcatcaatcacatccggcacctggttcagcttaccgagcacccggcccagcacctgcaggttgtagatctcgatggtcatatcaatggtggcgatctgctgtttaatgtcgctgcggctggcgacgcccagcacgttgactttttcgttagccagaatggtggtgatatcgcgtagcaagccgctgcgatcgttggcctggacgcgcaccaccagcgaatatcccgccgagtagctctcgccccataccgcctctacgatccgctccggcgcatgggagcgcagttccgccagctgttcgcagtcggcccggtgcacggaaatccctcgcccttgagtaatgaagccgacaatttcatcccccggaatcggctggcagcagcgggcgatgtggtgcatcaaattacccacgccttctaccaccacgcgcccgtcgtctttacgacgattttgcggcgcgtatgttttttgctgaagctgtttcagcgccgctgcatcctgctcctctgcactcggcttattgaactgtgattgcaggaaattcaccatctgattaagacggatatcgccgccgcctatcgccgccagcaactcttccagctcattaaagttgtagcgcggcagcagatgtttttcggcctctttcaggctaatccccaaatgcgccagctcatcgtcgaggatctgccgtccagcctggatatttttgtcacgatcctgcttgcggaaccaggcgtgaattttcgagcgtccgcggctggtcgtcacatagcccaggtttggattcagccagtcgcggctgggattcggctgcttctgagtgataatttcaatttgatcacccatctgcaactgataggtgaatggcacaatacggccgccgattttagcgccaatgcagcggtgcccaacatcgctgtggatgtggtaagcaaaatcgagcggcgtagatccggcaggcaagtcaaccacgtcgccttttggcgtaaaaacgtagacccgatcgtcaaacacctggctgcgcacttcatccagcatttcgccggaatcggccatctcttcctgccaggcgatcagcttacgcagccacgcaattctgtcttcatgaccggagcgcacgccgccggacgcggcgccttctttatacttccagtgtgccgccacgcccagttcggcgtcttcatgcatctgtttggtacggatctggatctcaacggttttaccgcccggtcccaggaccacggtgtggatagactggtaaccgttcggtttcgggttagcgacataatcatcgaattcatccggcaggtgacgatagtgcgtatgcactatccccaacgcggcgtagcagtcctgcagacgttcagcgacaatacgcacggcgcgcacgtcaaagagttcatcaaacgccagatgctttttctgcattttgcgccagatgctataaatatgttttggtcgtccgtagacctccgcctgcacgccttcgtttttcatttcggcgcgcagatgtccaacaaactcttcgatgtaatgttcgcgatcgagacggcgctcatgcagcagtttggcgatgcgtttgtattccgccggatgcaggtagcggaaacagtagtcttccagttcccacttcagttgcccgatgcccagacgattggcgagcggcgcatagatgttggtacattctttcgccgccagcacgcgctcatcttccggcgcctctttcacttcgcgcaaatgagcgattcgctcggccagtttgatcaccacgcagcggaaatcatccaccatcgccaataacattcgacggacgttatcaacctgctccgaagaaacagagtcgttatgagtggcgtttagctgacggatcgccgccatatcgcgcacgccatgaatcagggtaacgatagatttgccgacgctttcgcgcagtacatcttcgctgactacgttggcgtcggccagagggaacagtagcgccgcccgcagcgtgtcgatatccatactcagcgtggaaagaatttctaccatctccacgccacgccacagcaacagatccgcatccggatgtccttgtgtctgttgcaggcaatacgcccaggtttcggctaagcgctcacacgactgctggctggaaattcccaggcttgcgatccacttcttcggatcaaattcaccagctttattaatatgtgcacttcttaccgcgaccatcgtcctctccttaagggaccaggcctaccgaagtcggtaagccggtaatcattacatgcgctcgaacagaaccattgattccagatgtcctgtgtgcgggaacatgtcgagcatcgctaaacgcgtaacctcatatcccgcattgaccagcgcttcactatcgcgcgccagcgtcgccgggttacaggatacataaacaatgcgaataggttttaattttataatatgtcgcatcactcctgtagcccccgcacgcgcaggatcgagtaagactttgtcaaagccgtttttcgcccacggctgcttcgtgacatcttcctccaggttctcatggaagaatgtcacattatgtaaaccattgcggatggcgttttcacggcctttttctaccagcgccggaacgccctcaaccccaatcacgcttgccgcgcgcgttgccagcggcagcgtaaaattccccattccgcagaacagatccaggacacgatcctcggcgcgcacatcaagccactccagcgcgcgggcgaccatttgctggtttaccgcctcattaacctgaataaagtctcgcggactgaaggctaaacgtaagccgtgcgaatcataccagggcgcctcgccagataccgtttccagtatctcgctaaacggcgccagaaacagagacaatccctcagaatgcgaaaagcgttccagtttttctttatccgccgcacttaatggcgcggtatggcgcagaatcatcagcgtaccgcttcccgcctgtaccagctcaacatgcccaagatgtcgggtgccgtgtaaactcgccagacacgccctgattcggggcagcaatgctgcaagctggggcgccaaaacggggcactgttcgacattgacgatatcgctggaacccgctttgcgaaatcccatttgcagcggtttatccggcgggcaattcagacttaaccgcgcacgacgccgataaccccaaggcgcgccggcgatgatgtcattcacctcgtgtttcatcaaacgcgccagcgccgcgcttttgctgcgttgttgcagggcgatgctgacatgctgttgctgacaaccgccgcagacgccaaaatgcgggcagcgcggcgtttctcgttccgggctatcattcaaacggcgcgaaacgcgtgcgcgggcaaattgctttttatcttctgtaataatgacttctgcgctttcctcaggcaataaaccggggataaacagcgcttttccgttatgacgggctacgccctgaccaaatgaatcgaggtcattgactttaacggttatgatctgacgcgtcgtcacgcgccgttttgcagagtagaattgcgccatcgaccagctttttctcaatttaacagtgtgaccctaattgtcccataacggaactccatgaccaactacagcctgcgcgcacgcatgatgattctgatcctggccccgaccgtcctgataggtttgctgctcagtatcttttttgtagtgcaccgctataacgacctgcagcgtcaactggaagatgccggcgccagtattattgaaccgctcgccgtctccagcgaatatggtatgaacttacaaaaccgggagtctatcggccaacttatcagcgtcctgcaccgcagacactctgatattgtgcgggcgatttccgtttatgacgatcataaccgtctgtttgtaacgtctaatttccatctggacccctcacagatgcagcttcccgccggagcgccgtttccacgtcgtctgagcgttgatcgccacggcgatattatgattctgcgcaccccaattatctcggagagctattcgccggacgagtcagcgattgctgacgcgaaaaataccaaaaatatgctggggtatgtggcgcttgaactggatctcaagtcggtcaggctacagcaatacaaagagatttttatctccagcgtgatgatgcttttttgtattggcattgcgctgatctttggctggcggcttatgcgcgatgtcaccgggcctatccgtaatatggtgaataccgttgaccgcattcgccgcggacaactggatagccgggtggaaggatttatgctgggcgaactggatatgctgaaaaacggcattaattccatggcgatgtcgcttgccgcctatcacgaagagatgcagcataatatcgatcaggccacttcggacctgcgtgaaacccttgagcagatggaaatccaaaacgttgagctggatctggcgaaaaagcgtgcccaggaagcggcgcgtattaagtcggagttcctggcgaacatgtcgcacgaactgcgaacgccgctgaacggcgtcattggctttacccgcctgacattaaaaacggagctgaatcccacccagcgcgaccatctgaacaccattgagcgttccgcgaataatctgctggcgatcattaatgacgtgcttgatttctccaagctggaagccggtaagctcattctggaaagtatcccttttccactgcgtaatacgctggatgaagtggttacgctgctggctcactcgtcgcatgataaagggctggagttgacgttaaatattaaaaacgacgtcccggataatgtgattggcgacccgctgcgcctgcaacaggtcattactaatctggtgggtaatgccattaagttcaccgagagtggcaatatcgacattctggtagaaaagcgggcgctcagtaacaccaaagtacagattgaagtgcagatccgcgatacggggatcggcattccggaacgcgaccagtcgcgactgtttcaggcgtttcgccaggccgatgccagtatttctcgccgtcacggcggcaccgggcttgggctggtgattacgcaaaagctggtcaacgaaatgggcggggatatctctttccacagccagcctaatcgcggctcgaccttctggtttcatattaatcttgatcttaacccaaatgtcattattgacgggccgtcgaccgcgtgtctggccgggaaacggctggcttatgtcgaaccgaatgctaccgccgcgcaatgtaccctggatctactgagcgacacgccggtggaggtggtttacagcccgaccttctccgcgctgccgttagcgcactacgatattatgattttgagcgttccggtgaccttccgcgagccgctcaccatgcagcatgaacgtctggcgaaagcagcgtcaatgacggactttctactgctggcgctaccttgccatgcgcaaattaacgccgaaaagctgaaacaaggaggcgcggcggcctgtctgttaaaaccattgacgtcaacgcgcctgttgccagcgctgacggaatattgccagttgaatcaccatcctgaaccgctgctaatggataccagtaaaatcaccatgacggttatggcggttgatgataatcccgctaatctgaagcttatcggcgcgttactggaagataaagtccagcacgtagagctttgtgatagcggacatcaggcggtggatcgggcgaaacaaatgcagtttgatctgattttgatggatattcagatgccggatatggacggcatacgcgcctgcgaattgattcaccagcttcctcatcagcagcaaacaccggttattgccgttacggcacatgcgatggccgggcaaaaagagaagttgctcagcgcgggcatgaacgactatctggctaaaccgatagaagaagagaagttgcataatctgttgctgcgctataaacctggcgccaacgtagcagcgcgcctgatggcgccggaaccagctgaatttatcttcaatccgaatgcaacgctcgactggcagcttgcgctccgccaggctgccggtaagcccgatctggcgcgggatatgctgcaaatgctgattgattttctgccggaagtgcgcaacaaaattgaagaacaactggtgggagaaaatcccaacggcctggtcgatctggtccataagctacacgggagctgcggctatagcggcgtaccgcggatgaagaacctttgccagcttattgagcaacagcttcgcagcggcgtccacgaagaggagctggagcctgagtttctggagctgctggatgagatggataatgtcgcgcgtgaagcgaagaagatattaggctgatattcgccggatggcggcgtgaccgccttatccggcctacaactcagcgtaactgttgccccgctttcagcgttgcagccacgttgcgcgcggtcattcgtacgttttcactcgcattcttcagcgcgtcctccagcgtgcagatggtataaatcacgctgaaaaccgcatcaagcccatgttcatgaaccacgctaacgtccgccgtcaggctacccgcaataccaattaccggcttgttataccgtttggcgatgtttgccacgccaatagggactttaccgtgaatggtctggctgtcgatgcgtccctcgccggtgatgactaaatcagcatccgcaagacacgcttccagatgaagcgcatcggtgacaatctcaatgccacgccgtagctgcgcgccgcaaaacgcgtataacgccgcccccatgccgcctgccgcgccgccgcctgccagatccaacacatcgacatgcagatcgcgggcaatcaaatgcgcatagcgagtcaatgccgtatccaggcgttcaatcatttccggcgtcgcccctttttgcggaccaaaaaccgcagacgcgccctctttgccggtaaggggattcgtgacatcgcaggcgacctctatatggcacgccgacaaacgcttatccaggccgctgatatcaatgctggcgagtgtttccagcccaatgccgccttgcgcaatatcattgccctgcgcatcccgtagcctggcccccagcgcctgtaccatccccgcgccgccatcgttggtggcgctaccgccgataccaataatgatatgctcaacgcccgcatccagcgcatgacggatcagctcgccggttccccatgacgtggtcttcaacggatcgcgttgcgcgggcggcacctgctccagcccgctggcggccgccatttcaatgaacgcggaacgcgcatcgccggaaagcccataaaacgcattgacgcgatgccccaacggcccggtgacctcaacatgcacgattcgacccgccgtcgcttcaaccatcgcttcgacagtaccttctccgccatcagccagcggcaatttcaggtaatcggcgtcaggccagatctcgcgaaatccttgttcaatggcggtcgctacctcaagagcactcaaactttccttatacgagtctggtgcgatcactattttcataagtcgtccttacgcatgttgatcctgttaagcatacacccagagaagaaccggttccttacggaaccggctctgacttaacgcaccatgcaaggacgcttattatcaaacgtccagccaggaattaagtactgcattcccatcgcgtcgtcacgcgcgcctaagccatgtttttgatagagctcatgcgctttcatcacctgatccatatcgagctcaacgcccagacccggtttggtcggtacttgcaccatgccgcctttaatttcaaacggttctttagtcagacgttggttgccttcctgccagatccagtgggtatcgatcgcggtgatcttgcccggcgccgccgcggcaacatgggtaaacatcgccaacgaaatatcaaagtggttgttagagtgcgagccccaggtcagaccgaactcatggcacatttgcgccacgcgtacagagccttgcatagtccagaagtgcgggtccgccagcgggatatcgacggattgcagcgacagcgtatgccccatttgacgccagtcggtcgctatcatattggtggccgtcggtaatccggtcgcgcgacggaattccgccatcacttcacgaccagaaaaaccctgctccgcgccgcacggatcttctgcataggccagagaacctttcaggtatttaccaatgctgatcgcttcgttcagcgaccaggcaccgtttggatcgagcgtaacgcgcgcttgtgggaaacgtttcgccagcgccacgattgactcggcctcttcttcgcccgccagcacgccgcctttcagtttgaagtcgttgaagccgtatttttcataggcagcttccgccagacgcactaccgtttccggcgtcatcgcctcttcatggcgcagacgataccagtcgcattgctcatccggctggctctgatacggcagcggcgtggccttgcgattgccgacaaagaacagataacccagcatttcgacttcgctgcgctgctgaccgtcgcctaacagcgaagcgacgttgacgcccaggtgttggcccaaaaggtcaagcattgccgcttcaatgccagtcaccacatggatagtggtacggagatcgaacgtttgtaagccgcgtccgcccgcatcgcgatcggcaaactggttgcgaacggcggtcaggacatttttatattcacccagcgtttttcccaccaccagtgggatcgcatcttccagcgttttgcgaattttttcgccgcccggaatctcgccaaccccggtatggccggagttatctttaataatgacgatgttgcgcgtgaagaacggggcgtgcgcgccgctcaggttcatcagcatactgtcatgacccgcaaccgggataacctgcatttcagtcactacaggcgtcgtaaattgagtactcataactgtgtccttattcagaattagtgacgaccaaaaacagggcgtttgcggtcaaaagtccagccggggatcaggtattgcatcgggcctgcatcattacgcgcgccgcctggcagctttttatacgcgtcatgcgcttttcgcacctgttcccagtcaagctccacgcccagtcctggcgcatccggaacggcaattttgccgtttttaatttccagcggatttttagtcaggcggcaatcgccctcctgccagatccagtgcgtatcaatagcggtgggtttgcctggcgccgccgcgccgacatgggtaaacatcgccagtgaaatatcaaaatggttattcgaatggcagccccaggttagcccccagtcatcacacagttgcgccacgcgaacggcgccggtgagggtccagaaatgcggatcggcaagaggaatgtctaccgcgttgagcatcaccgcgtgtcccatttcacgccagttggtggcaatcatattggtcgctaccggcagtcctgtcgcgcggcggaactccgccatgacttcacgaccagagaatccttgctccgcgccgcacggatcttccgcgtaggtcagtacatcattcagccctttgcacaacgcaatggcttcatccagtagccaggcgccgttcggatccacggtaatacgcgcgtccgggaagcgtttttttagcgcgcgaacagtatcaatctcttgttcgcccggcagcacgccgcccttgagtttaaaatctttaaagccgtagcgatcctgagacgcttccgccagccgcacgaccgcgtcgctgtccagcgcttcctgatgacgcaggcgataccattcatgactgcccggcgtgctttccagatacggcagatcggttttagtgcgatcgccaatatagaagagatagcccaacacggtgacggcatcgcgctgtttaccgggtcctaacagttcacagaccggcacattaagcgcctgccccagtagatcaagcagcgccgcttccaaagctgccaccgcgttaacccgcagttcaaacgtccatgcgcctttaccaaaggtgtcaaaatcagcagcctggttgcctttatgcacctgctgcaccactttgttcaggcgggcgacttcctggcctaataccatcggaatagcatcgaccagcgtctgataaatcacttctccgcccggcgcctcgccgacgccagtatgcccggcgttatcggtgaggatgacgatgttacgggtgaagtacgcgttatgcgcgccgccgatgttgagtagcatactgtcatgtccggcaaccggaatgaccttcatgtccgtaataacgggactggattgcgttgtcatgataattgtcctgcgacaggtttcagttcaatacgcttaatatcgcctaccagcaccagatagctgatgatggccaccagggcatgtacgccgacatagatcaacgcgccgttgaaggaaccggtggtgccaacgatgtaaccaatcgcgattggcgtcacaataccggaaatattgccgaacatattaaacaagccgccggaaagaccgctgatctctttcggcgcggtatccgccattactgcccagcccaacgcgccgatacctttaccgaagaaggccaacgccataaagccgatgatcatccattccacgttcacatagttacagaacaccatgaccattgacagcaacatccccagcacaatcggcgtcttgcgcgcgatattcagggagccggtacgacgcatcagccagtcggaaatgatgccgcccaacacgccgccgataaagccgcagaccgcaggaaccgaggcgacaaagcccgctttgagaatcgacatgccgcgcgcctggaccaaatagaccgggaaccaggtaataaagaaataggtcaatgcgttaatacagtactgaccgatgtaaacgccaatcatcatacgagagcccagcagctgtttgatctggccccatttgacgctaaacggtactttcgctttggtgtctttctgatccatattgatcagcgcgccgccttctgcgatgtactccaactctttcttatttacgcccggatggttatttggttcatggataactttcaaccagataaagctgatgatgatccctaacccgcccataaagaagaagacatgcgaccagcccacttcgtgcgtcagccagcccataatcggcgcgaaaataaccgtggcaaagtattgcgcggagttaaagatggccaccgccgttcccctctcctgcgccgggaaccaggctgcaacaatgcgactgttgcccgggaaagaaggcgattccgccagaccaaccaggaaacgaagcgtaaagagggcgacaataatgccgaaaccactaaagatatcgacaaaaccctgcaacagggtgaagactgaccaaatgaaaatagaccagaaatagacgcgtttggaaccaaagcggtccagcagccagccgcccgggatctgcccgataacataggcccatgaaaaagcagaaaaaacatagcccatgcctaccggatcaaggccgatatctttggccatttctgagccggcaatggacaatgtggcgcggtcgccgtagttgaaggatgtgacgataaacagcatcaccactatccagtagcgggcgttcgtgcgtttctccgcactgctcgccgcgtgacttaatgaactcattgttgcactcctgaaatttcgcgttagctacgctcactctgaactgcacaaccggtagggaatcagagataacgtttccttgttgcagcttttattaggtcgtttgctttgcacgctgcatgcttttattcactggcaggagaagtataaaaagcgcgccacacacactcaccgtgcaacaacacagtattttggcgatgaattacgcctgtttatggcaaaagcccaggacagtggaagccacttcacggaaatgaaatcagaaggcgtcggcgtcgacgcaggaggagtaaaaagagaagaatgtgaaacaggtcgcttgattacatgaaaacgcccgtaaaaaactgctgcttttgcgggcatatgcacaaagctaacacgattcagttactttacactgtgtacaggtcatgattttgcttactggcaacgcaagcaaacgaaaaggtaccctcccgtaggggggagggatttacctcaggaaagtaaagttccccagttttcaacccagggattggactggctctccggctccggatgttcgctggcgtcaatgaataacatctcccccacccgctgcgcgctttgctcttgcaacagggcatcaaactgtttgccgccattacagaaattggggtagctgctatcacctaacgcaatcaccccgtaacgcaggtttggttgaaaaccgactgtatctttaatgccgtgaaagagcggcgcaatgctatccggtagatcgccctgcccggtcgtcgaggtaacgaccagcgcaaccttatcctgatattgctgccagtcggacagttcaggatcttcaaacacggtcgcgctgtggccctgtctggcgaggatcgcttccgcttcttccgccaccagcagtgagttgccatacatggtcccgacaaaaataccaatttccgccattatgcgtatctccctgaattatgtcagatgagtctcatcctgccgggacgccgccgtaaactcaaccctttcattgtcagggagaagtccacgccagccaaactgcgtcagcgcctgcatccaggtttcatccaacccggcctgaattatcaacggctgtccggtgaaggggtgcgtcagttcaagacgactggcatgaagcatcaggcgacgacaggcaaaatgctctgcggcgctgcggttttgtcgcaaatcgccatgtttactgtcgccgatgataggatgacgcagatgcgccagatgacgacgaagctggtgcttgcgtcccgtttttggttccagctcaaccaggccataacgcgtggtgggataacgcccggtcggcaccgccatttcgaccgtcgccagcccgcgatactgcgttacggccggctggggcgctttatcttcgcgggcgaatttatcggcaattttatcgcgctcttccaccagcggataatccagtaccgcgtcatccatcagccagccgcgcacaatggcatggtagcgtttacggatgtggtgctgctcgaactgctgcgccagacggcgtcccgcttcgctggacagccccattaacagtacgcccgacgtgggcctgtcgagacggtgggcggtaaaaacatgctggccgatttggtcgcgcaccgtttgcatgaccacgactttttcgtcgcgatccagccagctccggtgaacaagccagcctgcgggtttattcacggcaaccagccacgggtcttgatagaggatctccagcatcaggatttatcgcgggcgaatagcgcatccagatcctgcaaaaccgccaggatcgtctcccgctgcggatgatccgccgccagcgccatttcataataaggggcgacggcaaacgcctcgggcagcggctgcgcattatcaagtagggtatgcatacgtgggatcaatacccattgcagccattccagcggttccatggtatccataaaaaatggttgggtgctggtaaacaggtgcgcctgcggcgcatcctgccgccagtggcgatgctcgcgcagcagcgtttcaagcgtatgtaactgctgacgcacacggtcatgagtcgtcatgttaaaaacctcaatgatgaaaatctggcgcgaagaataacaaaaaaaagggagcactgtataaacagtgctcccggttcgtttcgcagcattccagctacttttcgtgctccctgctcatccgtgacaacttttcctgtgaccttacggcctgttcatcctgaacgtttgcatcctgcgcacatcgcccgatgtgatagcttcttcctgaagcgtccctggtcatccagacccgccgaacatcctgatcggctctcgttctccgtcctggaggtgtcctttaacgcatcctgcgctttccactttgcttcatcctgaagcctttccttgtaacaccatcctggcgtgtcctgctgaagcgtcatcatcctgacgttcgcttcgttgtacgactccctgtcgacgaagatagaatcgcctgtttcaccttgtcttacaagacgcttacagacaataccttaagtaaattttcatatgaaagtgcgcaaaaacattttaattagttgttttatatagacttacataagaaaacggggctcagtatccgctgatatcctggcgatctcctacagactttgtaagagatctctcacacctgttagggcaaacgattacagaagaggattaagttgcgtaaggaattccgcaagcgttgcggcaagaacggtacgattgcgggtgcccagcgtttctttaatcacctcgccggacagattacagaccgaaatgacctcaagctcattttcctgcgtcgcaataaaaagcgtgggaggaagcttgagccgcttttgcgtgaccaggtggcctatcagattttcctgcacgcgccgaaagtcatcctgactccaggtttgcagtagcgtaagcttttcatccgcaaactgcgcgggcatgtcgccagcaaactgcgtggtgtaaaacgcgtggagcgcaggttgtaccataatatcaaaggcgcgttcaaccgcgtttacattttcttcgccttcaaaaggttgcggctgccagtaaacggcatcgcgggttgaagaaataatgcacggagaaggtacgccatacagttcttcgctcaacggccagctaccgtgtttttcttgccacgcatcgcagtaacgcgtcgtaaaggctttcaatgcctgcgctgtcagttcgtccaccagtttctctcttcataaaagccaggatacacttggcgcatagtgtatctggtttatgacggtgaaacatgtcttcttatgaaaaccatcaggctcttgatggcctgactctcggaaaatcaacggattaccgggacaattatgacgtcagcctgctgcagggcgtaccgcgcagtttgaatcgtgacccgctcggattaacagccgataatttgccgttccacggcgcggatatctggacgttgtatgaactttcctggcttaacagccagggtcttccgcaggtcgccgtcgggcatgtcgaactggattacaccagcgttaatttaatcgaatccaaaagctttaaactgtatctgaacagctttaaccagacgcgctttgacacctgggagacggttcgccagacgctggagcgcgatctgcgcgcctgcgcgcagggcaacgttagcgtgaggcttcatcgtcttgatgagctggaaggacagcctgtcgcccatttccacggcacctgtattgacgatcaggatatcagtatcgacaactaccagtttactaccgactatctgcaacatgcggtcagcggcgagaagcaagtagaggagacgctggtcagtcatctgttgaaatccaactgcctgatcacccaccagccggactggggctcgatacaaattcagtatcgcgggcgcaaaatcgacagggaaaaactgctgcgttatctggtctccttccgtcaccataatgaatttcacgaacagtgcgtagagcgtattttcaatgacattctgcgcttctgccagccggaaacgctaagcgtttatgcgcgctatacccgccgcggcgggctggacattaatccctggcgcagcaataccgatttcgtgcccgccacgggcaggctggcgcgacagtaatttttttgtcaattttgcgtgccggattgcgcatgtaaggttgtgaaaggtcatcagccagggctattgtaatcaacagggaatggcgtgttgcgtcccataaggagtttacttgattacacatattagcccgcttggctcaatggatatgttgtcgcaactggaagtggacatgctgaaacgcacggccagtagcgacctgtatcaactgtttcgtaactgttcacttgccgttcttaactccggcagcctgaccgacaacagcaaagagctgctgtcccgctttgaaaatttcgatattaacgtactgcgccgcgagcgcggcgtgaagctggaattgattaacccgcctgaagacgcttttgttgacgggcggattattcgtgcgctacaggctaacctgttcgcggtgctgcgcgacattctctttgtgaatgggcagatccacaatgccggccgtttccagcatctggatcttgaaagctcaacacatatcaccaatctggtattctccattttgcgcaacgcccgggcgctgcacgtcggcgaagcgccaaacatggtggtatgctggggcggccactcaattaacgaaaacgagtacctgtatgcccgtcgcgtcggcacgcagttgggattacgcgagctgaacatctgcaccggctgcggccctggggcgatggaagcccccatgaagggcgcggcggtcggtcacgcacagcagcgctataaagacagccgctttatcggcatgactgaaccttccattattgcggctgaaccgcctaacccgctggtgaacgaactgatcatcatgccggatatcgaaaaacgcctggaagcgttcgtccgtatcgcacacggtatcatcatcttcccgggcggcgtgggtacggcggaagagctgctttatttgctggggattctgatgaatccagccaataaaaatcaggtgctgccgctgatcctgaccggaccaaaagagagcgccgattacttccgcgtgctggatgagtttattacccatacgctgggcgaagcggcccgccgtcattaccgcatcatcattgacgatgcggcggaggtagcgcggctgatgaagaaagcgatgccgcaagtgaaagagaatcgccgcgatactggcgacgcctatagttttaactggtcgatgcgtattgcaccggatctgcaggtgccgtttgagccgtcgcatgagaatatggccaacctgaaactgtacccggatcagccggttgagattctggcggcggatctgcggcgcgccttctccggtattgtcgcggggaacgtgaaggaggtcgggatacgcgccattgaagctaatggtccgtataaaatccacggcgatcgagagatgatgcgtcgcatggacgatctgctgcagggattcgtcgcgcagcatcgtatgaaattgccgggttccgcctacatcccctgttacgagatctgcgcttaacgcttatgcccggttgccgccagcagccgggcgcttctcccattcctttcattgcggtatggcgattcacgtatgccttcattttttatgatgatcatcagaggcatagcccgcattgttttataaacaccatttataattcaccataaatagattgccaggcaaacgtttacctgactcctcttaccgtgatttatcggttcaaactctcattcttcgcaagaatccactaaaaaccttgatttttatagtcaaacctccgtatcttgcgccccaatctttccggccttatatcgttaatggtagccttcgcgcccggaaattcgttatgacgtttttttaatagattaatggtccaaatttatccatgtaagaagcggattattgcatttgagatcgggatcactgatagattcatcacttaaatgtatctttccgcccgaaaattattacggcgaaaaattatataaaaagcgtccctaagcagatttcattttacgatcaggtcttttttcattggattagaccagcaacctgatttttagcatcctccaggagaaatagatggaaaccactcagaccagcactattgcttcgattgactctcgaagcgcatggcgcaaaacggataccatgtggatgctgggcctttacggcacggctatcggcgcgggcgttctgttcctgccgatcaacgcaggcgtcggcggcatgattccgctcatcatcatggcgattctcgctttcccgatgacctttttcgcacaccgtggtttaacccgcttcgtgctgtccggtaaaaatccgggtgaagacatcactgaagtcgttgaggaacacttcggtatcggcgcaggtaaactgattaccctgctttacttcttcgcgatttaccccatcctgctggtttacagcgtggcgattactaataccgtggaaagcttcctgacccaccagttagcgattaatccgccgccgcgggcgattctttccctgatcctgattgttggcatgatgaccatcgtgcgcttcggcgagcaaatgatcgttaaggcgatgagtatcctggtattcccgttcgtcgctgcgctgatgctgctggccttgtacctgatcccgcagtggaacggcgcggcgctggaaactctgtcctttgattccgccgcgtctaccggtaacggtctgtggatgacgctgtggctggcgattccggtgatggttttctctttcaaccactccccgatcatctcctccttcgcggttgcgaagcgtgaagagtacggtgaaggcgctgagaagaaatgttctaaaattctggccttcgcccacatcatgatggtgctgaccgtgatgttcttcgtcttcagctgcgtgctgagcctgacgccggcagatctggcagcggcaaaagagcagaacatctctattctgtcttacctggcgaaccattttaacgcgccgatcatcgcctggatggcgccgatcattgcgatgattgctatcaccaaatccttcctcggccactaccttggcgcgcgtgaaggctttaacgggatggtgattaaatcgctgcgtggtaaaggtaaatccatcgaaatcaacaaactgaataaaattaccgcgctgttcatgctggtcaccacctggattgtggcgacgctgaaccccagcatcctgggcatgattgaaaccctgggcggcccgatcatcgcgatgattctgttcctgatgccgatgtatgccatccagaaagtaccggcaatgcgtaagtacagcggtcatatcagcaacgtattcgttgtgattatgggcctgattgccatctccgctattttctactcactgttcagctaagtcctttagcgccgcttaccgcggcgcttctctatgatacaaccgcaatggatgccctatgattagcgtattcgatatttttaaaatcggcattggcccttccagttctcacaccgtcggaccaatgaaagcaggcaagcagttcacggacgatctgattgcccgccatattcttacagatgtcacccgcgtcgtggtggatgtctacggctctctgtcattgacgggtaaaggccaccacactgatatcgccattattatgggcctggcggggaatctgccggacaccgtcgatatcgacgccattccgtcctttatccaggatgtgaacacccatgggcgtttactactggctaatgggcagcatgaagtcgaatttccggtcgataagtgcatgaatttccacgccgacaacctgtctctgcatgagaacgggatgcgtattaccgcgctggcgggcgataaggtgctctacagccaaacctactactccatcggcggcggctttatcgtcgatgaagagcactttggtttgacgaatagcgaacccgttaacgtaccgtacccttacaaaaccgccgcggatttacagcgccactgccaggagacgggtttgtcgctctccggtctgatgatgcaaaacgaactggctctgcacagtaaagaagcgctggagcagcacttcgccagggtctgggaggtgatgcgcagcggtattgagcgcggtatcaccaccgagggcgtattgccgggcaaactgcgcgttccgcgtcgcgcggcggcgctgcgtcggatgctggtcagtcaggataagaccaccaccgatccgatggcggtcgtcgactggatcaatatgttcgcgctagcagtgaacgaagagaatgccgcaggcggacgagtagtcactgccccgactaacggcgcatgtggtattgttccggcggtgctggcgtactatgacaagtttatccgcgaagtaaatgctaactcgcttgctcgctatatgctggtcgccagcgcgattggctcgctgtataagatgaacgcctctatttccggcgccgaagtgggttgtcagggagaggtcggcgtggcctgttccatggcggcagcgggtctggccgagctgctgggcggtagcccggcgcaggtgtgcatcgccgcagaaatcgccatggagcataatctggggttaacttgcgatccggttgccggtcaggtacaggttccctgcattgagcgtaacgcaattgcttcagtcaaagcggtcaacgccgcgcgtatggcgctgcgccgtaccagcgaaccgcgcgtatgcctcgataaagtgattgagaccatgtacgaaaccggtaaagacatgaacgctaagtaccgcgaaacttcgcgcggcggcctggcgatgaagatcgttacctgcgattaattctcagcacattttaggatctgtaagccggataaggcgctcgccgccatccggcttttgttgcctgatgtcgcttcgcttatcaggcctacggatagcgctatttcgcaatgctcgcctccccccgccgtgaatgttaccctacgcgcaggtttgtaagggagaacaccgtggctgctcatctgcttatcgtcgacgcgctcaatttgattcgccgtattcacgccgttcagggatcgccctgtgtggaaacctgccaacacgcgctcgatcaattgattattcacagccagccaacccatgccgtagcggtatttgatgacgacgcgcgcagcagcggctggcgtcatcagcgtttgccggactacaaagcaggacgtccgccgatgcctgacgatttacataatgaaatgcccgccctacgcgccgcatttgaacagcgcggcgtacgctgttgggcatcagacggtaacgaagcggacgatctggcggcgacgctggcgctaaaagttaccgaagccggacaccaggcaaccattgtgtcaaccgataaaggctattgccagttgctctctccgggattgcgcattcgcgactacttccagaaacgctggctggacgcgccgtttattgaaaaagagtttggcgtacttccccggcagttgccggattactggggtctggcaggaatcagtagttcgaaagttcccggcgttgccggtatcggccccaaaagcgcgacccagctattgattcagtttcaaaatctggagggaatttacgcccatctggacgaggtgccggaaaagtggcgcaaaaagcttgagacgcataaagaaatggcatttctttgccgcgatattgcacgtctgcaaaccgatttacatatcgacggaaacttacagcagctacggctggcgcggtagttttgttgccggatggcggcgtgaacgccttatcctgcctacaggactgcacgaaatgtagagcggataagcgcagcgccatccggcaaaattaccaggcggtatgatacagttcgacaatgtccgccagactcgcttcacgcggattgccgcccgtacagacatcatcgaacgccgcctgcgccagcgccgggatatcctcttttcgaacgccgacatcacgcaaatgcagcggaattcccacatcgcgatttagcgtaaatacggcttccactgcggcattacgcgcctcttcaaggctcaatccttctaccttcacccccatcgcccgggcgatatcacggaatttctcgttggtagacccggcattgaaacgcatcacatgcggaagcaaaatagcattcgcgacgccgtgtggcgtgttgtaaaacgcgcccaacggatgcgccatcccatgcaccagccccagccccacattggaaaaccccatcccggcaacgtattgccccagcgccatcgcctcaccggcctctttttctccggctacggcgccgcgcagcgcgccagcaataatctcaatggctttgatatgtaatgcatccgtcagcgcccatgcggcccgggtaatatagccttcaatagcatgggttagcgcatccacgcccgttgccgctttcagcgcgggcggcataccgtccatcatatcggcatcgataaatgccgcctgcggaatatcatgcggatcgacacaaacgaatttgcgccgtttctcttcatcggtaatcacataattgatagtgacttccgccgcggttcccgccgttgtcgggatcgccataatcggcacgctgggtttacgggtcggcgatagcccttccagactgcgcacatcggcaaattccggattgttactgataataccgatcgctttgcaggtatcctgcggagaaccgccgccaatggcgatgagatagtccgcgccgctttgggtaaagaccttaagcccttcctggacaacggaaatcgtaggattagggatcacgcccgcatagatctcccacgccagccctgcggcatccattctgcttgtcactttatcgaccacaccgcattgcaccagcgttttatcggtaacaatcagcgctttatgataaccgcggcgcgtcacctcatcggttaatgcgtccaccgctccccggccaaaccatgccgtttcattcagaatcattctgttcgccatcgcctgtctcctgacatcactcttcaatacgtaatccgtaagttttaaatttctccagtacgatagcgatcgcctcgtcatccagtaccggtaccggatcgacaatggccagcgtacttaaatagagctgcgccagcacttccacttcatgcgccagccacaacgctttgtctaaattttcttcacaagcgataagcccgtgatgctgtaacagcgtcgctttacgatttttaagcgccacggcaacatggtcagaaagttcgcgggtgccaaaagtggcgtagggcgcgcagggaatagagtttcctcctgcggcggcaatcatgtagtgaatcgccggaatcgggcgattcaggatcgagactgccgtacaatggacagcgtggttatgtaccacggcattggcgtcagggcgcgtctggtatgccgccatatgaaaacgccactcgctggaaggcagcttgccctgctcatgctgaccgtcagcatcaataaagacaatgtgcgactctgtcagcttctcgtaggggatccccgtcggcgtaatcagcaatccgccctgataacgtacgctcacgttacctgccgtcccctgatttaaccctaaccgcgtcatttccagacaggtatcaataatctgccgcgccagtctatttcgttccattatttacctctctctgtgattcaaaatgagacaacaaaaccgcctttcgcattgcgctgctgtcctgttgaaataatcgaatagttagcaactatcatcatactgaataaagagaagggaatttaaataacgatattttgtgattcacatcaattaattcgccacgataaaccagacgactaccgtttctctcgccgataaatgcccgctcttaataatattttttaaaacgggcaaagatgaagaataagttactactgcccgttttcgtggcaataatttaattcgggcattcagcctgtggttttttaaattaaacatctcaaacggtcattttttatgaaaattaaagtgatgataatcacagaacgctatgctctcaggtataaatgtgaccgccatcatattaaaaggccttttttatttgaaaatgactccatgagttcattccggacgccaatttattaccggtaagaaaagcgaactcacctaattttacggtctggtgaccagaaccgaccgcacgcaaaagcttctgaaccgatgaggatgctatgggaaacacaacaatacaaacacagagttttcgtgctgtggatgcagagcaaagcaaaagcaagcgctacattattccattcgccttactttgctcgctattttttctgtgggccgtcgccaataatctgaatgacattttattaccgcagtttcaacaagcttttacgctaactaactttcaggccgggcttattcagtcagccttttatttcggttatttcgtcattccaattcccgctgggattttgatgaaaaaactcagttataaagcagggattatcaccggactttttttgtatgctgttggcgccgcattattctggcctgcctccgagataatgaattacacattgtttttaattggcctgtttatcatcgccgccggtttaggctgccttgaaactgcggccaacccttttgttacggtattaggtccagaaagcggcggacatttccggcttaatctggcgcaaacttttaactcctttggcgctattatcgccgttgtgtttgggcaaagccttattttgtctaacgtgccgcatcaatcgcaagaagcgcttgataaaatgacgccggatcagcttagcgcctataaacacagcctggtgttatcggtacaaacgccatacatgattatcgtcgccatcgtattagtagttgcgctactgattatgctgaccaaatttccggccctgcaaagtgacgatcatagcgatgctaaacaaagctctttcttatcttctctctcccgactcatccgtatccgccactggcgctgggcggtgctggcgcagttctgctacgtgggggcgcaaaccgcctgctggagctatctgatccgctacgccattgaggagatccctggaatgacgcccggtttcgccgccaattacctgaccggcacgatggtgtgcttctttatcggccgtttcaccgggacctggcttatcagccgcttcgcgccgcataaagtgctggccgcctacgccctgtttgccatgctcctgtgtctgatttccgcctttagcggcggacatatcggcctgctggcgctgacgttgtgtagcgcatttatgtcaatccagtacccgaccatcttctcgctgggtatcaaaaatctgggacaggacactaagtacggctcgtcttttatcgtcatgaccatcattggcggcggtattgtcacgccagtaatgggcttcgttagcgacgccgcaggcaaaatcccgaccgccgaactggttccggcattgtgctttgccgtcatcttcatttttgcccgtttccgttcacaagcggcgacaaactgaacatttatccgaataacgtgaggaatctgtcatgaaaaaaatcagcttaccgaaaatcggtatccgcccggtgattgatggacgtcgtatgggcgtacgcgagtcgctcgaagagcaaaccatgaacatggcgaaagcgacggcggcgctcatcaccgagaaaatccgccacgcctgcggggctcaggtggagtgcgtcattgcggatacctgtattgccggaatggcggaatccgccgcctgtgaagaaaaattcagtagccagaacgtgggcgtgaccattaccgttacgccgtgctggtgctatggcagcgaaaccattgatatggacccgatgcgtccgaaagccatctggggctttaacggcacagagcgtcctggggcggtttaccttgccgcggcgctggcggcgcacagccagaaaggcattccagcgttctccatttatggccatgacgtgcaggatgccgacgatacctccattcctgccgacgtcgaagaaaaactgctgcgttttgcgcgggcagggttagcggtagccagcatgaaaggcaaaagctacctctccgtcggcggcgtgtcgatggggatcgcgggttccattgtcgatcataacttctttgaatcctggctgggcatgaaggtgcaagcggtagatatgaccgaactgcgccgccgtatcgatcaaaaaatttatgatgaggccgaactggagatggcgctggcgtgggcggataaaaacttccgctacggcgaagatcagaacgcctcgcagtataagcgcaatgaagcccagaaccgcgcggtgttaaaagagagcctgctgatggcgatgtgtattcgcgacatgatgcagggcaacaagacgctggcggacaaagggttagttgaagaatcgctgggctacaacgccattgccgccggcttccagggccagcgccactggaccgatcaatacccgaatggcgataccgccgaagcgctgctcaatagttcttttgactggaacggcgtacgcgaaccgtttgtcgtcgccaccgaaaatgacagtctgaacggcgtagcgatgctgttcggccatcaactcaccggtaccgcgcagatattcgccgacgtgcgaacctactggtcgccggaagccgtagaacgcgtcaccggccaggcactcagcggcctggcggaacacggcattattcacctgattaattccggttctgccgctctggacggtgcctgtaaacagcgcgacagcgaaggcaagccgaccatgaaaccgcactgggaaatcagccaacaagaggcggatgcgtgtctggcggccaccgaatggtgcccggcgattcacgaatacttccgcggcggcggctactcatcccgtttcctgaccgaaggcggcgtaccattcaccatgacccgcgtgaatatcatcaaaggcctggggccagtactgcaaatcgccgagggctggagcgtcgaactgccgaaagcgatgcacgatcagcttgatgcccgcaccaactctacctggcctactacctggtttgcgccgcgtcttaccggcaaaggcccgtttaccgatgtctattcggtgatggcgaactggggcgctaaccacggcgtactcaccatcggccatgtaggggcggactttattactctcgccgcgatgctgcgtatcccggtatgtatgcacaacgtggaggaggcgaagatctaccgtccttccgcctgggcggctcacggtatggatatcgaaggccaggattatcgcgcctgccagaattatggcccgctgtataaacgttaatgcggcttaggccggtggcgcaggtttaccgggactacgggcgcgtgaaccgtaggccggataagcgtagcgccatcgggcggcgtttatggagttatctatgaaacaagacgttatcctggttctcgactgcggtgcgacaaacgttcgggcgatcgccgttgatcgccaggggaaaattgtcgcccgcgcctcaaccgctaacgccagcgacattgccgcagaaaatagcgcctggcatcagtggtcgctggacgccatcctgcaacgtttcgccgattgttgcaggtcactctccagcgccctgtcggagtgtgttgttcgcggtattacggtgactacgttcggcgtcgatggcgcgctggtcgatgcgcagggcaagctgctctacccggtcatcagttggaaatgcccgcgaaccgctgccgtgatggaaacgattgagcgctttatctcgccccggcaattgcagacgctctccggcgtcggcgcgttcagctttaacacgctgtataaactggtctggcttaaagagaatcatccgcgcctgctggaacaagctcactgctggctgtttatctcgtcgctgattaaccaccgtctgaccggcgagtttacgaccgatatcactatggcaggcaccagccagctcctggatatccatcagcgcgactttagtccggaaatcctgcaggcgacgggcctggcgcgccgcctgttcccgcgtatcgtggaagcgggcgccccgataggcacgctacagacagacgcggccaggctactcggtctcccggcgggtgtgccggtgatctctgccggacacgatactcagttcgcgttattcggcgctggcgcgcagcaaggtgaaccggtgctctcctccggaacatgggagattctgatggtgcgcagcggtcaagtggatacctcgctgctcagtcagtatccgggctcgacctgtgaactggacagtcagtcggggctttataaccccggaatgcagtggctggcctccggtgtactcgaatgggtacgaaaactgctgtggacgccggaaacgccatggcaaacgctgatcgacgaagcgcgcgctattcccgctggcgcggaaggcgtacggatgcagtgcgatctgctcgcctgccaaaatgcaggctggcagggcgtgacgctcaataccacccgcggccatttctatcgcgccgcgctggaaggcctgacggcgcaacttcagcgtaatctgcgcacgctggagaaaatcggccattttaacgccacagaactgttactggttggcggcggcagtcgcaacgctttatggaatcaaattaaagcgaatcagcttgatatccctatcaaagtgctggacgacgcggaaaccaccgtggccggcgctgccatgtttggctggtacggcgtaggcgaatttagtagcccggaacaggcgcgcgcgcaggtcaattatcagtatcgttatttctggccgcaaaccgaacctgaaattattgagggagtatgaaatgctaaaaaccatttcaccgttaatttccccgacactgctcaaagtgctggccgagatgggccacggggacgaaatcattttttccgacgctcactttcccgcgcatagcctgggcccgcaggtgattcgcgccgatggtcttagcgtcagcgatctactgcgggcaattattccgctctttgagctggatagctacgccccgccgctggtgatgatggccgccgtggaaggcgacacgctcgatcccaacgttgaagcgcgctatcgcgatgccttgtcattagaagcgccgtgcccggatatcgttcgtatcgaccgctatgcgttttatgagcgggcgcaaaaagcgtttgcgatcgttatcacaggtgagtgcgcgaagtacggaaatattcttttaaaaaaaggggtaacgccgtaatctcttgccggtgcgcccgcatgacgcgggcgttcatcgaatgatggggtgagaaaaatgaaagcggcacgccaacaagcgatagtcgatctgctgatcaatcataaaagtctgaccaccgaagcgctggccacccggcttaacgtcagtaaagagaccatccgccgcgatctcagtgaactacagacgcagggaaaagtgctgcgtaatcacggacgagctaaatatattcatcgtgaaaatcaggacagcggcgatccattccatatccgcctgaaaagccattatgcgcacaaagccgatattgcccgtgaagcgttagcgtggatagaagaaggaatgacgattgcgctggatgccagttcaacctgctggtatctggcccgccagttgccggatattcccattcaggtttttaccaatagccatcctatctgtcaggagctgggaaaacgcgaacgcattgcgctgataagttccggcggccagcttgaacgtaaatatggctgttatgttaatccgtcgcttatctcacagctaaaatcgcttgatatcgatctgttcatcttttcctgtgaggggatcgacggcggcggcgatctgtgggactccaatgcgatcaacgccgattttaaatctatcctgctcaggcgcgcctcgcagtctttattattgattgataaaagtaaatttaatcgttcaggagaggcgcgcatcggccatctggatgacgtgacgcatattgtttcagatgcgccgcaatcgtagaccggataagcgtgcgtcatccggcgctgatgacgcgccggacgacggcaacgcgtttttatcgctcgtcgcgacgtccgccaacagccgcccacaaccgacgcacgtgtaccgtcacttcttcgcgatcgtgataaagctgacgcgcctggatctgcgcattaacgccgtgctcatccaactgcgcctgaagatacgccaggttatgcgacacctcttcatagcgttttttcatcggcagtttaaggttaaaaatcgtctcccgacaccagccgttcaccagccactgcgccattaacgcggtgactttggccggcttctccaccatatcgcagaccatccatgaaatattattccggttcggacggtacctgaagccatcctcacgcaaccaggtcacctgtccggtgtccatcaggctttgcgccatcgggccgttatctacggagtagacccacatattgcgcttcactaactggtacgtccatccgccgggacaggcgcccaaatccaccgcatacatgccgttcgccagacgttcatcccactcatcttccgggatgaaaacgtggagcgcctcttccagtttcagcgttgagcgactcggcgcatcagacggaaacttcaaacgcgggatgcccatataaaacggtgaattgttatgcgcgaacgaataaccggtatagcagcatcctggcgcgataaaaaagacatgaacgaccggacgcttcggcgtttcataattcgtcaatacgcccgcatcacgcaaagccgcgcgcagcggcaccgtaaatttgcggcagaacttcatcagttctttactttcattggtgtcggcgacttcaactcgcagctcgccgcccttttccactacgccctgcaacatgccgacaatcggcgtaattctgtcttccggcggtaaatgttgcagcagttcacccaccacaaaccactggcgggcgaaaatcagcgaactgaacggcagttctgaaatcagcttttcgccatcttccggctggtagcattcataaatgacatagcctgcgttctcttttacgcgtgcaaaaccaaatatttcccgttttcccgctttatcggtaatttctgcagcgcactctttttcaaaccccggacggcagagcaatacaactttattcatggctcgcgcccttacgtttcatacgaatggcgccaatcagcaatagcgcccagcccaccaggaaactgacgccgccgacaggcgtgatatacgcccacaggcgcagatgcgaaagcgcaaggcagtacaggctgccgctaaacagcaccgtgcccagcgccagaaaaacgctgctccagtaaaaccagatgctgatacggcgctgcatcgccaccgccaggccaaagatcgccagcgtatggaacgcctgatattgcaggccggtctgaatccagcccatttcaaccacgcccagggttttactcaaaacatgcgccccgaacgcgcccagagcaacgtaaataaaaccgctgatagcggcgacaatcagcataaaacggctggtcatggtcataccctaagttaattattgttcgtaacgaaaacggaatttttcttgctccgtcgccgccttcgccaaaatccactgacggaaggcggctattttacccagttctgcctggctgtcatgacaaaccagataaaaagcattcttactcaccagaacatcgttaaatggacacaccagtcgcccggcttcaatttccgactgcgccataacattattcgccagcgcgatcccctgtccgtgaatagcggcctgtagcaccatcgcgctgtggctaaatatcggcccttgctgaacgttaatatggttgagccctaactgacgagtataggcctgccagtcacgccgggaggcgtcgtgcaatagcgtgtgtttcgccagatcttccggcgtttttaacggtttttcgcctgtgagtaataaaggagaacagacgggcagtaaatattctgcgtataatttttcgacgcgcaagcccggccagtttccccggccataaaaaatcgcgacatcgacatcgtctgccagtttatcttcctgacggtcaacggcttgtatccgaacgtcaattcccggataagctgagttaaagctggagagcctgggcaccagccactggatggcaaaactgggcggtaaactcaccgtcagcgcccctttggcactgcgcgcctggagcttacgcgttgcttccgtgagctgggaaaatatctctttaatgtcgagaaaatagctttggccttcttccgtcagcagcagcgaacgattgcggcggcggaacagttttagccccaaaaaatcctcaagtgacttaatttggtggcttactgcggcctgcgtcacaaaaagttcttccgctgctcgcgtaaagctcaaatgacgcgcggcagcatcaaaaacgcgtaacgcatttaaaggaggtaatcgttttgacatggcctctggacttaatgtcgaatgaatttaacaaataggtaacaacatgtaacctattagtttttttaatctgagacattataaattgtccgttgaggttctaccagcaaatacctatagtggcggcacttcctgagccggaacgaaaagttttatcggaatgcgtgttctgatgggcttttggcttacggttgtgatgttgtgttgttgtgtttgcaattggtctgcgattcagaccacggtagcgagactaccctttttcacttcctgtacatttaccctgtctgtccatagtgattaatgtagcaccgccatattgcggtgcttttttttgtataacaaacggttagttttccagagccaccatctctttcacgtcagtacgattgatctgctgtttgttgccattagcgtctttatacgaaatcataccggtatcgttatcggtctggggtttaccgtcggtcacaatgctacgtccatcattggtgtgcataacgtaattaggaccggaacaggcgctcagggcaaaagtcagcatacatgcagagataattgcggcagtctttttcatcttcttctccttaaagctgtttgtgctatttaaagcggactccgtaacaggcttaaacattcgcctaacattattcagcataacctcctttacataattcgccaggatatacagacgattccgatggttaggacaaaccttgtatcagccgcgcttttacgccacgatcggtaaactgaaccgaggaatatcatgaacgcttttaatcccacgcagtttcgcgcgcagtttcccgcgctagccgatgcgggtgtttatctcgatagcgccgccacggcattaaagccacaggcagtcattgacgccacgcaccagttttattgtttgagcgccggtaacgttcatcgtagccagtttgcgcaggcgcagcgcctgacggcgcaatatgaagcggccagagcaaaagcagcgcggctgttaaacgcgcccgatgaaaaaagtatcgtctggacacgcggcaccaccgaagcgatcaacatggtggcgcagtgttacgcccgtcctcgtctgcgccccggcgatgaaattatcgttagcgtcgccgagcatcacgccaaccttgtgccctggctgatggtggcgcaacaaaccggcgcgcaggtcataaaactgccgcttaatgaccggcgtcttcctgatgttgagcgtctgccggaactgatcacgtcgcgcagccggattctggcgctggggcaaatgtcgaacgtaacgggcggctgcccggatctcgcaagcgctatcagcgccgctcacgcagcgggaatggtcgtgatggtagatggcgcgcaaggcgcggtacacttcccggcggatgttcagcagcttgatatcgatttttatgctttttccgctcacaaactgtatggcccgaccggtatcggcgtgctgtacggtaagccggagcttcttgaggcgatgtcgccctggctcggcggcggcaagatgatccgtgacgttagctttgaaggcttcaccactcaaagcgctccctggaaactggaagcggggacgccgaacgtcgccggggtcatcggcctgagcgctgcgctggaatggctgtccgatatcgatattgaacaggccgaaaactggagccgcgggctggcgacgctggcggaagacgcactggcgaaacgcccgggctttcgttcgttccgctgccaggactccagcctgctggcctttgattttgtcggcgtgcaccacggcgatatggtgacgctgctggcggaatacggtattgcgctccgggccgggcaacattgcgcccagccattgctggcggaacttggcgtcacagggactctgcgcgcctcttttgcgccgtataatacccaacatgatgtggatgcgttggttaacgccgttgaccgcgcgctggaactgctggtggattaatgacaaaccctctttataccggacacccgttcggcacaacggtaacggaagagacgttacgcgctatctttctcccgctgacccagtgggaggataaatatcgtcagttgattctgttaggaaaacagctccccgctctgccggatgaatgcaaagcgcaggcgaaagagatagccggctgcgagaaccgcgtctggctgggctttacccgatcagataacggaacgatgcactttttcggcgacagtgaggggcggattgtccgcggcctgctggcggtattgctcaccgcggtggaaggaaaaaacgccgccgagttgcaggctcgttcaccgctggcgctgtttgatgagctgggtttacgcgcccagcttagcgcctcacgtagtcaggggctgaacgcgctgagcgaagcgattgttgccgcaacgcataagggttgaaatagcgtaaatattctgtcgcctgacagcgccgcccgcagcggtcaggcgatgcagataaaataatccagtcactttattagtttcggcgtcagatttccctgataagcattcttttgatttttatcagctatcacaatgaaattacaatgttagaatccatgttaaaacggcgtgaagattttagagtaaataaagccactcgatgtagcgtagcaggagaactggaaaattcatacgcatcgggtgaagttataacaggatatggataagtggaaaaatatctgcgtagcggtaccatgtttgtggtactggcatttatattatgggggttaacacctttatattatcaatatttatcaggggggaatctcgcacaaatattgatataccgggtgttctggtcaattccattattactggcagtaagattgttatttcggcagcgaacgcgatttcatgatgcctggaaagataaaaaatcttttttcttctgcatgatcgccggacttttgatgattgtctcatggtcatcttttatttatgcgctaacccatcatctggtgcttgatgccagcctcggctattttatcaacccgctatttgttattgcgctgggatgcatttttcttaaagaaaaactgtcgttgtttcaggccatcgccgttttttccggtgtctgcggcctgacttttcaaattatcatgctacggcatttcccggcgctggcgctaaccatgggattatcatttgcgctatatggcctggcgcgaaagtttatacattatgatgtgatgacatcgataacgattgaaacattatgggcattgcctgtctcactattaatttttctctttagcgatactggaccaattatatccgctaatactcctttctttttgtatgtcatgacggcgccagtgacgatcattccactggtattatttgccatcgcgttaaatcacacctcgttgattgtcaccggactggcgcaatatatagagccgtctttacagttcttacttgccattatgatatttggcgagcacattaattacgcggaactgctctgcttttgtgcagtatggttcgggttgtttctatgcatatctgaaaatttatattcccattatctccgcgcccgtctgaaaccggtgttcggcagggtacagcgcttctttcgctaacgaagggcgcagggccggatacgcgtctgcgtgacactccgccccgtccttttattcttgtcgcgccgctttagccatgatcttcttcagcgcatgggaaacggcgacaaaaccgaacgttgccgtcaccatcgtcgccgcgccgaagccagaggcgcaatccatccgttttggcccttctgcggtagctttcatcgcgcatacggaaccgtccgcctgtgggtaaaccagcgcttcggtggaaaaaacgcagtccacgcccagcttacctttactgttcttcactacgccaaaattatgtttcaatctctcgcgcagttttgccgccagcggatcctggatggttttcgccaaatcagcgacctggatttgcgtcggatcgatctgcccgcccgcgccgccagtggtcactaaaggaaccttatatcggcgacagtacgcaatcagcgcggcttttggacgaacgctgtcaatagcgtcaatgacataggtaaaacccgcgttcatataacccgccacattatccggcgtgatgaaatcatcgataaccgttacccggcactccgggttaatttgccgaatccgttcggccatcacttccgctttcgccaacccgacgttatcacgcaacgcatggatctgacggttcgtattggtcacgcagacatcgtccatatcaatcagcgtaatcgcgccgatgcccgtacgcgccagcgcctctgccgcccatgatcccaccccgccgattcctacgacgcagatatgcgcctcagcaaaccgctgcagcgctttttcaccgtacagacgcgcggtgccgccaaagcgttggcgccaggcatcacttatcaccactgacatatgacctcagaataaaaaaaggtgaggttattcctcacccctgctcactattttcaggcccgatagcgatcgcgttatcgggcaatccggttgtcgcagaataccacaatcagccgctaaacacgttaccggcgcccggcgcgctttttaacacccagacgcgaccatagtgattataccatccggcacgatgcccggcatccgggccaattccctggtaaatatcaaagtgctggcctttaatcgctccgccgacatccagtgcgaccatcaaacgtagctcatactgaccgctaaatttaccgttgttatccagcaacggtacttccgccaacaaggtcgtgccaggcggaatgatgctgcggtcggaggcgacggatgctcgcccaatcagcggtacagcgctggcgcctttgaccggcgcaaaagattgcggcttaaagaagacgaacgacgggttctgctccagtaattcacgcacttccgcttcgctgtgcttctctccccattcgcgtatagcctgcatcgacatatcttcttttttcacttcaccgcgatcgataagcactttaccaatactgcgataaggccagccgtttttaccggcataactaaagaagttcagcggactaccatcaccaaaatcaatataaccgctgccctggacatccataataaagttatccatcagcgaattactccaggccaggatgtacttatcgctcagcgcgcctgcgtagatctgagcgcgggacggtaagcgtccgcgttttggcggcatactatagataggatactggaacgcgccctggcgcgtatggcgagcctgaacgacgggcgtatagtagcccgtgaactggacgttaccgtagttgtcggtgccttccatctgccaggcatcgataccaaactgacgcatagtgcgcgtatcgcctccggaacgtaaccagttctggacagcgttatagacgttgctttgattggtgtataaacgcggcgacgcggaacggatctggttgacctgctcggcaaagtctccagcattaatcggcgcgcccactgcgtccggctggtttaccagggagaagggctgggtaaatttcccgtccttatattgctgaccgcgatcggtcggttttgatgaacaggcagccagcattgccagcattacgcctgtcgccacatattttgcccaacgtcctttcatggtgtctcgtcttctgcgtaatcgaaagtgcccggtgaagataacaaaccgtccgaagtaatgaaatgcgatcgcgatctcattatgtaaattcgtttaaaaatcgcgctatctgcggtgtatttgcgcaattcatgagaaattagcgatttatatgaaaaaagggttgcaacaaaagctcagcggagtatagtgcgcatccacggacgcggggtggagcagcctggtagctcgtcgggctcataacccgaaggtcgtcggttcaaatccggcccccgcaaccaattacaatgagaatgcaagtttagacggacgcggggtggagcagcctggtagctcgtcgggctcataacccgaaggtcgtcggttcaaatccggcccccgcaaccaacttaatgaacacccttacgggtgtttttttgtatctgtcgtctggtccgcaacgacagtgcgggcagcatcctacttacccgcgcaataaactcgccgtcatctcaggttaacttcttctcgccagcgtcgccccatcggcaaaatacgctttaatgcccgccagaatcgactctgcgacctgttgctggaacgtcgcggtcttgagcttgcgttcttcttcaatgttactgataaacgccgtctcgaccagaatagacggaatatcgggcgcctttaacaccgcaaaccccgcctgctcgaccttgtttttatgcaggtcattaattttaccaagctgcttcaacaccgctttaccgaatttcaaactatcggcaatggtcagcgattgcaccatatcgaacatcgtatggtcgacataacggtcaccgcttttgctcacgccgccaattaagtccgaggcgttctgcgtttgcgccagatatttcgccgcagtactggtggcgcctttggtcgatagtgcgaatacggatgaaccgctaggctgccggctggtgaaggcatccgcatgaatagagacaaacaggtcggcgcgctgtttctgcgctttcgccacccggacttttaacggaatgaagatgtcttcattgcgcgtcatatagaccttcatgttgccttctttttcgatcaacgcgcgcaggcggcgggctatctggagcaccacgtctttttcacgcgttttgtatttgcctatcgcgccggggtcttcgccgccgtgtcccggatcaagcataataacaatggggcggtcgcgccccgctttaccgggctgcggcccgctttgcgaaggcggcacctgcttatccagatcgcctttattgtagtcttccagcagcgccagcagcggatcctgcatatcctgcgcattggcaggataaagatccatcaccagacgttctttaaagcctgccacaggcgccagcgcaaatagctgcggcttcacgttttgttttagctcaaagaccatacgcacagtcttaggatcaaactgccctacccttgcggatttgatatacggatcgtcgctgcgaatctgcgcgccaatgcctttaagcaccgagttcagattcacatcctcaatatctactaccacgcggtccgggttacttaaggcaaattgtttatatttcagcagacgattcgactctaccgtgacgcgggtatagctggacgcaggccagatacgcaccgcaacgacctggcttacggcagccagcccgacctggctcacgcttaatagccacatggcgcccgcgccttgtagtaaacggcgacggctgattgctgaattggctcccgacatgcttctcccgagcaaaaactaaatagagatcatacaaagttcatccaaattgaccggaaactttagcgaatgacgcataatctgtcatctataaaagggtaaacattctttttatattcacggcattactaagaaaagcgatcggaccgcataaaatttacgcttgcacagagggcaaaaacagaataaaaatacactaatttcgaataataattcactagtggggcgcgcaatgataaaggaacgtaaaaccgaactggtagaagggtttcgccattcagttccctatatcaacacccatcgcggaaaaacctttgtcattatgctcggcggcgaagccattgagcatgacaatttttccagcatcgttagcgatatcgggctactgcatagcctcggtattcgccttgtcgtggtgtatggcgcgcgaccgcaaatcgacgccaatctggccgcgcatcatcatgaaccgatttaccacaaaaacacgcgggtgacggacgccaaagcactggagctggtgaaacaggccgccggtttactccagcttgatattaccgcccgtctgtcgatgagtctgaacaatacgccgttgcagggcgcgcacattaatgtcgtcagtggcaatttcaccattgcgcagccgctgggcgttgatgatggcgtggactactgtcatagcggccgtatccggcgcattgatgaagatgcgatcaaccgccagttggataacggcgcgatcgttctgatggggccggtcgccgtctcagtgaccggcgaaagttttaatctgacctcagaagagattgccactcaactcgccgttaaactgaaagcggaaaaaatgatcggtttctgttcttctcagggcgttaccaatagcgagggcggcatcatttctgaactcttcccgaatgaagcacaggcgcgggtggaagagttggaagcgcagggcgattacaactccggaaccgtacgttttttgcgcggcgcggtaaaagcctgtcgtagcggcgttcgtcgttgccatctgatcagctatcaggaagatggctcgctattacaggaattgttctcgcgtgatggtatcggtacgcagatcgtcatggagagcgccgagcagatccgccgcgccaccatcaacgatattggcggtattctggagcttatccgcccactggaacagcagggcattctggtacgccgttcccgtgaacaactggagatggagatcgataaatttaccattattcagcgcgataatatgactatcgcctgcgcggcgctgtatccttttgtggaagagaaaataggcgaaatggcctgcgtagcggtacatccggattaccgcagctcatcgcgtggagaagtgcttctggagcgggttgccgcccaggcgcggcaaatggggctgcgtaaattgtttgtgctgacgacgcgcagtattcactggttccaggagcgcggttttacgcctgtcgatatagagttactgcctgagagcaagaaaaaaatgtataactatcagcgacgttcaaaggtgctgatggcagatttaggataacaaggggggcctgatggcgctgcgcttatcaggcctacgctcgaaagcatcatttggaggccggataagacgctacgcgtcgccatccggcgagaactcgtcttatccggtacgactgacttcatcaaataaggtggctagcccgctgcgccgctccgtacgcgtcacaatcgcgcctgccaggatccgttcatcggcatacagcgataaccgccgccgcgctcgcgtaacagcggtatacaccagctcccgcgtcacgaccggcgaacgctggctgggtaaaatcagcgcggcgtgatcaaattcagacccctgtgatttatgtaccgtcatcgcccaggttgtatcatgttccggcagacggctgggctgaacggacttgatcgtgccgtccggcatcacaaaccagacgcgtaacccctgcccgcgatcgagcgcaataccaatatcgccgttaaatagccccaacgcgctatcgttgcgcgcaatcattaccggacgcccttcgtaccagcgagaatgcgggtgccgctgaatttttcgttgctgcaccatcgcctgctcaatgcggtcattcaatcccctcacgccaaatgggccttcgcgcagcgcacaaagcagttgatactcattgaaagcctgaaggattgcctccggcgtcgctttttcatgcagcaaccgcaggtagcgaccatagcccgccagcgcttcatccagcatcccggcataatcgtcgctgctttgcaatgtacgcttctctatatcgctaaacccctgctgaaaaacagcctggattgccgacctgtcgccgcagttaattgccgccgccagcttgccgatgccagaatcgctgccgaaacgatagctcttttgcaacaaacagaggctatcgcgtaaagatgcggcttgcgttccggcccccgccggaatggcgctaccagtgagtcgacttagctgtcgggcgcgttccgccgtaaaccctgcgttgacataggcgcaaatatcgcccaacacagcgcccgcctcaacggatgccaactgatcgcgatcgccaagaaaaatgacccgcccgtgcggcggcagagagtcaatcaaacgtgacatcatcggcaaatcaatcattgatgcttcatcgaccaccagcacgtccagatgtagcgggttgcccgcatgatggcgtaatcgttggctgccgggctgtgcgcctagcagtcggtgcagcgtactggcgtcctccggtatacgctttttctgcgcatcggtaagaggaagctgacgcaacgccgcgccgagcgactccgtcaggcgtgcggccgctttcccggtcggcgctgccagccggatacggcaacgttcgccatccgccatttgaattaatgccgccagcagcttcgcgacggtggtggttttaccggtgccgggaccgcctgaaatcacggagatacggcgagttagcgctacggcggcggccaccttttgccagttcacctcgtctgtcggagggaatagcgcgtccagaatacgggataactgatcttcatctacggcgatggcctggttaacctcgttaaaaaagcgcgcaaccgtacgttcgttgcaccacatgcgattcaggtagagacgctcgccgcacagaattaacggcgcggggctatcgccgcagctaaccgccgcagacgccagtaaccgctttttccagtcgattggcgtagccgtttcgcttatacaggcgaccagtaagggatgcgcctcctccgttaacgttaaacgcgacaacggcagacacacgtgaccttcacctgcgtcatgactaagcagcgctgccgccagcgtcacggcgggatcgtcgttaccggcgacggttaaagcaaactgggcatcaatgggccgtaagagtttttgttcaacggcctccagcaaccgctcctggattgtcattgcgcctcctcactcatttcacctgcaaacatatcatccagttggttaattaacgccgccgcaggacgagtggtaaaaataccctgctgcggacgttcgccatccaccccgcgtaaaaagagatagatgacgccgccgaaatggcgttcatagtcgtaattcgtcattcgatgacgaaggtaacggtgcaatgccagcgtataaagctggtactgcaaatcatagcgatgcgcctgcatcgccgcagccatcgccgtctgggtataagcggcgctatcctcgcccagccagttagatttatagtcgagcaggtaatagcgcccttcataacggaacaccaggtcgataaagccctttaacatgccgcgaacctgcatgaaatccagcgcagggcaacctgctgaaagcgggtcgtatcgacgaatcaacgcatccagctctccggcggtaagcggctgggcaatcggcagataaaactccatttcgacctgtttttcacgctcggtcagcacgctcagactaacgcccgtctcgttaaggggaacgtgtaacacggtgtccagccagcgggtaagtacgggctcccatcgcgtttcaaaaccactcagctccagtttttcctgtacccattgggggtttatcggttgagtaaaatcaagctcttcaaacaggctgtgcaaaaatgttcccggcgatgccccgcgaggaaagtgatgcggcgtcattgccggcgcttccgccgcttcgccaacgcctgcggcgtcaatgtcgagacgaggaataagatcttgcgccacgctatgtccccgctgctgcaaaccggaataactggtgacgcgccagctatcataaagcaggcgttgcagcgctctggcgctgagttccgcatgcgatgcagcggcaatttgccagcgatcgttatccgtgttgcctggcgttcgacacacgatatcctcgtcgcatagcgcctcaatacaggcgcgaaggcctgcggcatccatcggttcgcctttttgcaggagtcgcccaagcgcgctttggtgcacatccgtctcgcctttcttatcgctgcgacgccgtaccagcggcgcgacgccgaggctgcaatgccacactgcacgggtcagcgcgacataaagtaggcgcaggtcttccgccaggcgttcggcttccgccagtgctatgctctcttcggcgtgactaaggtccagcaccgcctcgtaggagtgcctgtcgtgataaaaagcctggtcctgcacgcggaaatgggtgataaaaggtaaccagaccagcgggtattccagacctttcgatttatgaatggtgacgatttgcaccagatgcttatcgctttccagacgtagttgctggctggaagcattgctatcgggttcaaggatatgttgcgccagccaacgcaccagcgcatgttcgctttccagctgcgaaccggcttcctgtaacagttcgctaatatgcagaatatccgtcagccgacgttcacctcccgccgtcgccagcaggttttcagcaatattgcgcgccgacattagcgcgcgcagcataggcatcacgccgcgtttatgccaaatctgtcggtagccatcaaactcttcgacaaccgcatcccacgcattttcatcattgttaagcgtttcgatatccagcgcggtaaggcccatcattgatgtcgccagagcgctacgcagcgtattctcacgttcgggcgccatcaccgcctgcaacacccacagcatttcctgcgcttcgagcgtttcgaatacgctgtcgcggtttgaaagatagacggaagggatcgccagtaaggtcagcgcatcccgtatcagcgcggcttcccgcctgctgcgcaccaacacgctgatatccgaggcgcgaacgggccgcgacgaatcgccgttcgtcagcagcgcgtcgcccgtttgcccggcgcgcagccagtcgcgaatttgcgtggcgcacacctgcgccatataactttgataatcgcccgaaccgcagctttccccctccattagccacagggtcatcgccggttgaggcgcgtcattcactttaaattgcagcgactggtttctgggcgcaaactttaccggactgaagggaatatcgcggaacataaaggcgtcattcatctgactgaacagcttgttaacgctattcaccatccccggcgcggagcgccagttagtgtcaagggtatagtgcgcgctcacttcgctgcgagccttcatgtaggtaaagatatccgcgccacgaaacgcataaatcgcctgtttaggatcgccaatcagcaatagcgccgtatcgggttgatgtcgccagatacggcgaaaaatacggtactgttgtgggtcggtatcctgaaattcatcgatcatcgccaccggaaaacgggtacgaatcgccgcagccagcgcctcgccgctttcactacgcagcgcggtatctaaacggctgagcatatcgtcaaaccccagctcgccgcgccggcgtttttcctgagccaccgtttcacggatctctgatagcgctcgggtaagaaccagatctttaatcgatagcggttcgcccaacaggttatcaatggcgacaaacaatgggtgctggggcgtcacgccgccagctttggtgcgctcagctaaaaaacgctgtgaaaattttcccaacgcctcgggtaattgatagtttttcgtctcttcttgcgcccacgcggtgatcttttcgatccatttcgcctgattgccgcggttgaattttctgcgatcgatgccggatgattcgatcagcgcgtccagctcgctaaccgcctcacaccactgctgcttcacctggttgatgcgcgccaggatctgttcatggcgcgatgccagcgtctcctcctgcgatggcggcgctttaatgaccggcgcttcgccctgcagataacgatcgatatcctttaagagcgccttcggtcccttccacacgtcaaacaccacctgcgcgatgtcgcgcggcagcggatagcaatgacgccgccagaaatcggcgcaggcctgataacgcaacaaagattcgtcttcaataagctgttgctcaaacaacataccggattcgaaagcgttcaggctgagcatacgctggcaaaaaccgtggatggtaaagaccgcggcctcgtccatttgtcgttccgccagtaataaccactgcgcggcctgctttttgtcgctaatttcttccagcaagcgggcataaagcggattatccgtgctttcccgcagacaggcgatgcgcaactcatggatattactgcggattcgcccacgcagctcttcagtggcggcctccgtaaaggttaccaccagcagttcttcaacggtcaacggacggggaaatgcggcgctgccgcctaaaccgagcagtagccgcagatacagcgccgcgatagtaaacgttttgcctgtgcccgctgatgcttcaatcaaacgctcgcctgtcaggggcaagcgcagaggatcaagagtctcggcgacatcattcattcttttcgctcattagaggtaacgtttgctgcaaagcgctgacgttatcccacactttccagcctgtcggatgcacgtattctgcttttccattctggctaccggcaatctgtgacaatattgccataccttgtggttccaccaccgcctggtggaagaaatcggcaagcttttgtggcgtcagcaattttatctgagcgatgattttatcacgcgagtcaaagcgcatattaccccgatcgaaatccttgcttaaacgggatgcttcttcgcccaacgtttgcggcgcctggcgcatttgcgtaatgatcgcctgctgaatttgggcgaactcttccggcttcatcgccctcagcttcgcctcggcgtcagggaaaaatgcctgatagcgttgccacaggtaagagggctgtttatcgttgctctgtagcaggaaccccattccccactgacggccaacgctcatcggaaaggcgaaaacggcgtatcccagttgctcttcggttcgtagctgattgtaaaaccacggttgaacaatctgacctaacatcgcgctgtaggcagcgctgacgtactcgtcgtagccgaccggaacaaagaccgcggctaacgcggagtcggtgctactgcccgctttttcaaatattacggactgctttttctcaaccaccacgtctttgttgcgacaccacgccgatccgttcgccgcgagctgtttttgaacatcttgcgccagagaggtcgcctgggcttcgctcatattccctataaccagaaattccggacgagcgcccgtttttaacgcattacgataggccattacctctttcaacgtaatggacggcagcaaagcgcgacgttcatcacgggaaaaataaggcacctgcgaaatcatctgcaccggcataatcgcctgctcgtaggcttttcccttctccgcagaatccatcatctgcgtataccaggatttcgcctgcgccagctgttcctccgtggcgtcgtagctaaaatatccttccagcaacgccaggaaaagctgcggcaaacgctgggtataaccgttcgcagtgaccatcagaccattgttggcgttagtagaaaagctaatgccgcccactgccgcctggttgctgagctgatcgagcgccattcccgccagataatcattaagggcgaacagtacctgattgcgggcgctgtccatcgcctgcgggttacgcaataccacgctcacgtcagcttttggctcgctggcgaaataacgactcggcgcataaaccacgcgcaaatccgctttatcgacaatcagttctggccgcacgtagtttttgtcattcttaacaagcgtaaaatcatcaggaatataggggtttaactccggcagcgacaacgcaatgccctgtgctttttgctgccagtttttaaacgtctgttcgctaatcttatcgacctgataaggcgcatccacaaaatacgccgtcttattatggggttcctggggactgatgtaccagatgcgcgcattctgcggcgtcatcatcgccaggcgatttttgatagcggcaggatcgtaacgatcggcgatattcgccgcatccagcgtatgcgctaccgggacgcggatcatagtgtccgccagccattcgacatagtccatatcgcgggtaatcgacggatagcggaagtcgagatccagcacatgcgccagctcgtcaaagtaacgtttatctatccctttttcacgtaacatattgagatagctgaaaatagccgcgacgacttcatcacgattggctaaacctttatcggtcagcgttgccgaaatggcaaatacgccgctgttaccattaacaatcggatcggaatccgcgctaataccttcgaccagtccttgtttttgcagccagtcagagagcgtccctgggctacgattgccaattagataagagaccagttcatcggtcttgctgcggaactgcgcgctattgttatcaatacgaaactccacgcgcagcactttacgcggtagtgccggcacgtaatgaataatgatgcccttctgcgcctcggtgatgacaggtacggtaatttccggttttttaatctgtttattcggcacgcgaccataggttgcggcggcaatactcgccagttccggcaagggtttattactgtaaatcaccgccttcatcagattagatgaatagtatttttcatgaaaagcgatcaacgcctgttgcaccggatttcccggcttatcgcttagcgtttccagattgccgccagaaaagtgcgagcctggatgcgccgggttaatggtttcggcgcttacctgcgccatacgcataccgtcgcgggtgcgcgccatcgtcagctcggcattcaccgcgtttcgttcgcgttcggcatactttttattgagcaatggcgcggcaatggcgtcggccagtcgatctacggcacctggaagcgcgtcgttttcaacctccaggtagaaggctgttcgataaggcgcggtgctggcgttgtggctaccgccatgtcttttaaggtattcggcaaggctatccgcctgcggatatttttttgaccccatcaggcacatatgctcaagataatgagcaagcccctgatgagcctcaggatcttcaagcgatccaacgggcaccactaacgctgaaagcgactttacagcctgcggatcggatacgagcaacaccaccatgtcattatcaagacgtatcgcctgatactgccgggtatctttatcgcttttacggatagtttcttgcagcggttgccaaccgatatccgcctgaactgcaggcccccagagggcgaccaataacaataacgctttgaaccaggtgctgcggggcattcacggacctcatcattaactttcattcccactcatctgtatggtcacgtaaaccatcgacctgagcagaacgggatattattgtgctgaaccaggcagcatttttttatcagtaatcagtccgtgacgaagagcgcatcatagtcgaagccttttaatggcgcgattttcatacaatcaacgagactgattaaaacgaaacagcggtaacaggtaatgccgtgactgcgcaatgatagcctgcaacgtttcagattccagctgacgccaaagacgttgataccagatatcttcgccttcgccgctcaccatcatgttgccttcataagcctgtagaaactttgtcctggccttctgtaaagtatcatcgtcgtctaacatgacatcattttcagcgtcataacaggcttttatccatgcgccgccgctttccggcagtaccaatagcggagaagacatgccttcccggtagccttcaatcagttgcgccaggtaagccattgcctgcgttttatcaagaggcggaaatcgccactctccctctttacgcaaaaacaggcgactttcgccactaccgccgctggcacaatagacaaggtgttccagccaaagttgcacaccttgcgccacgctgattaaagcgggacgccagcgcaataatccatcctcctgtacctgcggcagccagccggttagctgaacgccattgcaaagcagatccacttccaggctttggctcggcttacggcaggcgatgacccggcttgccagttgctgcatctcctgacattgcgcatcccagaatatttcgccaaacgcgccgtaaggcaactctcccgcagcccggaaacggcggaacaagcgttcggcgtcgtcctcttcaaccagcgtattgagcaactgttggttaagttgatatcgcgtcaatccctctaattcaaacggttccgcatcaggaatctcactctcttccgagcggaaattaacctgaagccgcatctgaaaaaatgcgcgtaccggatgggcccaaaaacgctgcagactttccagagtcaatgtttccggcatcgtaaaaggaagcggctgcacaaagtcagaatgcgcttttcccgactgactcgccgcgggcaaccactctctggcataactttgctgttcgccgggttggtaattttgcgcatcaaaaggcatacgggtatgcagacgcgtaatatgcgctttgactcgtgcttcgctctcatcacaggtcagcgtttcgtcgcccggcaaatagtggctttgtccgatgtaatccaccaattcttgcaccagtacagagggaaagcgttcgctattatcctggatggagcgaccgatgtagctgatatacagcgtctgctgcgccgagattaacgcttccagaaacaggtagcggtcatcgtcgcgacggctacgatccccgcgcatgggtttttggctcatcaggtcaaagcccaacggcgcaagctggcgcgggtatacgccgtcgttcattcccagcaggcaaacgactctaaacggaatggaacgcatcggcatcagcgtacaaatattgatggggcccgccaggaagcgctggctaatacgttcctgatccagacgctgcgccagttcatcccgcagtagcgaaatcggtaccgcgtcgccatattccgccgcgacgccttcggcgataatggcctgccactgctgttcaatcaatgtcattgccgcttccgtgtccgcatcgggcaggaagaaatcattgaacatatcgcgacaaacgggcagccactcttccagcggtcgctcctgcgccagaccgcgccgccagatattaagctgcatcagcagcgaagccagatgcccgaccagctcagcaatcagaccgctggattcgtcataaggcagaaccgactgccactcgccctgggcgctttccatcgcataccccagcagcatacgcgtcaggccaaattgccacgtatgctgccccgtggcaggaagttccagctcgcgtacgttgtcatcgtcaattccccagcgaatgcctgactcattgacccacaagcgcaaataacgcagcccttcttcgttgatcgtaaagcgggcagccaataccggtacgtctaacaacgccagaacatcctcggagacgaagcggctgtccggtaacgaaagcaggctgataaatgcctgtaacaccggatgtgactgacgcgcccgccgatcggaaatggcataaggcagatagcgctccgttggcgcgctaccaaataccgcctggataaacgggctatagctgtcaatatcagccaccataacgataatgtcgcgcggcgttagcgtcggatcggcttccagcatcgccagcaggcgatcgtgcagtatttccacctcgcgctgcgggctgtgacaaacgtgaaaagagaggctgttatcctcgggatcgagcagacgcttattgtcgctgcgcgaatactcctcaagatttacgcccgccaccgcatggctttccagttcaagaatatccgcctgaatccgatgcaaaagattatctggcgtaatatcaacaaacgcatccagttcctggctgttttccagttcagatagcaggtagatataatcccgccccagttttccccatgaggccagtagcggattaccgatatcctgttcaccgtcgctgttaaataaggcttccggattctggttttcacggaacaacggtaaatgacggtcttcaaaactgtgacgacgctggcgagccatgagttttgccagccaggctgggtcttttatatccccccagtaataccgacacggattagtaaaaaggagatggatttcaatatgtttacccagcgcctgcaatgctctgagatacactggcggtaacgcggaaatgccgcaaataaaaacgcgggacggcaaccctggcgggcaggcggtcgcgctttccagcgtttgaataaagcgttggtagagattggcgcgatgccagcgcggctgccccagcgcggcggtatattccaccaatgctttccacaacggcgcctgccagttttgcgcctctcccagaccttccacggtttttcccgcttcccactgcgtaagccagtcaggccgataaaccagatactgatcgaacaggtcggcggcgcgcgcggaaagctgaaagagtttgcgtttatcggtgtcgtcggtcagataatggcgcagcagtacaaactcatccttatccagcaactgcggcagcaaggtcatcagtttccagctcatgctttgtttgctgaaagcgctttctttgggaatatccggcaacacgcggacaaacatctcccagataaaactcgccggtaacggaaaagcgatattcgccgcaataccaaacttttgtgaaagggtcatctgcagccactgcgccatacccgtgctttgtaccagaatcatttctggttcaaagggatcatccagccgctcgcgttcgacgatgaactccatcaacgcttccagcacatccagacgattggagtggtagacccttaacataattactcctgacgattaacgatttggacaatgcaagcgcgtcatctgcccctgcctgccagagggtgaaaccatcgtgacgctgatgctgacacatcccgattgcgttgtctgcatccggttggccttccagtcgtcagcaggcgaaaatggatacagcgccgtttgctgccacgcctgccgccagatctggagatactggtgtcgtaatgcaaaactgtgcattaatacccgctgatagcctgacagcgcggtgacgatcattaccattagaaccatcgccactaaaacttccgggaggctaaacccgcgttgtaaattcaggggatgcgacataacgccacctcttttaacggacaaaaatcgctccagccgtggggagaaaagacaatgcttccctgaatgacgttgcccaaacgccataacgtcatgccgtcatcttgcgccgccatcaccacctcatcccccgataatctccgcaaacagactctcgctcctgaagaggaatagcgccgacattccatttcggttacgcctgaccatagctgcccccgtccccattccagcgccgactgcacaagcgcctggcgttgtatcgccaggctctgcgtcgtcacgcgggcggcatagctggcctgctgctgatttacgccttgcagtagcagactgcccagaatcagtattaaaagcgccagtattagcgaagaagcgccacgttcccgattcacagattaaatcccgttacgctgtattgcgcgtcaataaccgtctgaggctcggctttgctggcgccgcgcagatgcagcatgagcactggcgagaatcccgttatatcccggcgctcaacggtaaacgccgtgatgagtaccgtattgggatcggtcattttttcccatcccttaccctggcaagatgttgctccgcgtaatgtctccagaacgttatccttcatacggaacccggtctggtcggcctctttcgccggtatggtatcccagaccccgttattattcccgtcccactgaacgatgacgcattgcccctgttcggcaagatgtaacccttcgccaatgcagtggccatgacagtaacccgcacgttgaagatgcttcgctacggtataggttcgctgccagatttcatcttccagcgataactgtcgcgtgttgtgccagatctcgcgttgtagcgccggtaaaaatcgtgcggacccaagcagtaaaatggaaccgatcgccatcgccagcacaacctccagtagcgagaacccccgcgtggttattgacacgtggcggcctcgttacgctcgcatagcctgattcgcccccaggaggagacgaccagacgccactctccggcagcgtttttcagtacgatgtgccctgcccatgccgtattgcgcaagccaaagaaggctaacgacggcgtgatatcggcaaggacgacatcacgccagtcgggcgtaaacacaaagggggaagatggcgtacacgatgtttgcgtagcaacagagctgacaaagcaccatgaaccgccttcgctgaccacgcgaagaatgtgatcgcggttatgccagtgagcgtccccacgaagttgcagcaggtaatcccgcacctgacatgcggtttgccacaggcgctgttgctgctgccagcgttgccagccataaagtcctgtggcgctgagaatgataatgagcgacatcgcgaccaccgtttcaatgagcgtatagccctgttgttttttcatgtcggcagtatggcgggcggaagaaaaataacgagcgccaaatacagattgttcggcgcgttacggaaaaaagttcatgtcttgcagcgcgttgcaaaatttcaggaatgcgcgccgaagattgagacgaagggtaaaaaaaaccgacgcgcgatgacgtcggttatggcaggatcgtcagcgcttagatagcgaccggcgctttaataccggggtgcggatcatagccttcaatttcgaaatcatcgaaccggtagtcaaaaagcgaatcgggtttacgcttaatgaccaatttcggcagcgcgcgcggttcacggcttaattgcaggtgcgtctgctccatatggttgctgtacaggtgcgtgtcgccgccggtccagacaaaatcgccgacgtccaggtcgcactgttgcgccatcatatgcaccagtaacgcgtagctggcaatgttgaacggcagaccgaggaacacatcgcaggagcgctgataaagctgacaggagagttttccatctgcgacataaaactggaaaaaggcgtgacacggcgccagcgccatcttatccagctcgccgacgttccacgcagaaacgataatacgacgagagtccgggtcgtttttaagctggcttaagaccgtggcgatctgatcgatatggcggccatccggtgttggccatgcacgccactgcttaccataaaccgggcctaaatcgccgttctcatcggcccattcgtcccagatggtgacattattttcgtgcaggtaagcgatgttggtatcgccctgcaaaaaccatagcagttcgtgaataattgaacgtaaatggcagcgtttcgtcgtcaccagaggaaagccttcctgcaggttaaaacgcatctgatggccaaaaatggaaagcgtgccggtgccggtacggtcgtttttctgtgtgccttcatccagcactttttgcatcagttctaaatactgtttcatggttcctcaggaaacgtgttgctgcgggcggcggcgatatgcccaaaccatcatgatcgcgccagcgataatcatcgggatagagagaatctgccccatgctgatgtactgtacccacgcgccggtaaattgcgcgtccggctggcggaagaattcaacaatgatacgaaacgcgccatagccaatcaggaataatccggagactgcgcccatcggacgcggtttgcgaataaagagattaaggatgataaacagcaccacgccttctaatgccaactcatacaactgggaagggtggcgtggcaatacgccgtaggtatcaaaaataggctgccattgcggatgtgacggcagcagcgcaatatcttccgcgcgtgagccaggaaagagcatggcaaaccggaagtcaggatcgacgcgcccccacaattcaccgttgataaagttgcccagacgcccggcgcccaggccgaacggaattaacggcgcaataaaatcagacacctgaaagaacgagcgcttcgtgcgcctggcgaagataatcatcaccagtatcacgccgataagcccgccgtggaaggacatgccgccgtcccagacgcggaataaatagagcgggttatccagaaacagagggaagttataaaacaggacatagccaatacgtccccccaggaagacccccaggaaacctgcatagagtaaattttcaacttcgtttttggtccaaccgcttcccggacggttagcgcgacgcaccgccaaccacatcgcgaaaacgaaccccaccagatacatcaagccataccagtgaagcgcgacgggcccaattgagaaaatgaccggatcaaagtccggaaaatgcagatagctactggtcatctgtcaccacaatttcttgttatttcgctgaagagatagcgattgataagcgcgcctgcgcgttgcagacgctccaaaggtgcgaataatagcacaagggttaaaagcgagatgccgattaccgttaaaagatatgtatacgcattgtctttcatcttgcaggcgtgttgtctgcgccgtgaatccacagtcactctcttttcccgctccagtcgttacaaccctcctcgaatcaatccccccatcccgcggcgctccataaacgccgccacctgatgacgcacttcggtcgccatctgcgcctcaaggctgcgtctggcaagggtttgcgcgtcttcaaaatcgatatgccgcagcagatatttcacacgcgctaccgaacggccattcatcgaaagatggcgatatcccagaccgataagaatcgccacgcacatcggatcgcccgccatctcgccgcacaagcgaagatcgaggccatgtttttcggcttcctgcgcgatcatggacagtgcgcgcagcatagccggatgcagactgtcgtaaatactggccacgcgggtattgttgcgatctaccgccaggatatattgcgttaaatcgttggtgccgaccgagataaagtcgatccggttagccagatgcggcagcataaataccattgatggtacttccagcataatgccgatacgcggtttcgggatcgcatagccgatcatctcctcgacctcgcgcccggcgcgttcgatcagacgccgcgcttcatcgacttcatcaatactggtgaccatcggcagcaaaatgctgaggttgccagtcgccgcattggcgcgcagcatcgcgcggacctggatcaaaaagatctccggctgatccagcgtaatgcggatcccgcgccagcccaaacacgggttctcctcgctgatcggcatatagggcagttgcttatccgctcccacatccagggtccgcagcgtcaccggtttatcgttaaacatttgcagcatcccttgatactgcgccacctgctcttcttccgagggaaacccgctttgcagcataaagggaatttcagtacggtacaggccgataccgtcgatccgactgcctaacttttcctcatgctcgggactgagcccggcattcagcatcactttgactcgctcgccgcttttcagttgggcgggaagattgacgtcgtcctccgccagacgactgagttctatctcttcactaatgagccgctgatattcctgaataagcacgggttcaggatcgaccagtaattcaccgcgatagccatccaccaccaacgtacggcgatgtagcaccgaaggctggatatcagcgcccatgacggtcgggataccgagcgcgcgcaccataatcgccgcatgcgagtttgccgcgccgtcgcgcaccacaacgcccgccagcctgtcctgcggcagctccgccagggtggtcgccgacagctcatccgcgaccagaataaaacgttccggccaggcgtttggcccctgaactgaatcatcaagatggaataacagccgctgccccagcgtgcgtaagtctcccgcacgttctttgaggtagttatcggttagcgccgcaaattgctcggcaaatttttcgatgatttttttaacggcccactccgcaacagcgcctttgtcgacctcggcgaagagttcgcgacgcagtctggcgtctgaaagcaggtgtgagtacagatcgaaaatggccgccgtctctttttgcgcgccggcggcaaagcgtttgctgtatcgtcggaattcgttcgccgcctcttccagagcgccggtcagtcgttcgcgttcaagagaggtatccagcgtagacgcttcgtaaacctgttccatcagcggcatggtcgcgtcttgccagcccgttgcgatagccacgcccggcgccgcaggaagcgcgcggattcgcgtctgccggtattgcccgaacagcgctgtgacctgcgactgtgacaggatagccgccatctgcgtagcgagcgtgacgaggaaagactcttcgctttcatcgtactggcgcaattcgcgctgctgtacgaccagcacgccgagaagttggcgacgctgaatgatcggcacgccgagaaacgcgcgaaaacgctcctcttttaccgaaggaatgtatttaaagctgggatgtttttgcgcatcggcaaggttaatgggttccgccagtctgcccaccagaccgacgatcccctcatcaaacgcaagcgcaacggttcgaccacgcggttttttcaacccccgcgtcgccatcaggtaataacagcgtcggtcatgatcggccaggtaaaccgagcaaacctctgtatccatcgcaagacagatatccgtgaccagaatattcagcgcctcgttcagacgcggcgcactggccactttttcgactatttcgcgcaggcgagtgagcataatttgcgtggcttaacctcttttacgtcgataagcaggcgcgctttgtagcttagggggattatcctgaagcgccatgacaacacttgcaaactctttcattaccctgcggtagacatcgcgtttaaatgacaccacttgtcgaaccggataccagtaacttacccagcgccagccgtcaaactccggcgtactgctggtttgcatattgatttcggcgtcggcgctcattaactgcaaaagaaaccacttttgtttctggccgatacataccggctttgtgtcccaacgcaccaaacgttttggtaacttgtaacgcaaccagttgcgagtagaagcaaggatccgcacatctttacggcttaacccaacttcttcaaacagttcccggtacatcgcctgttctgccgactcccctggatttatcccgccctgcgggaactgccaggagtgctgaccaaatcgccgggcccacatcacctgcccctgacgattacaaattacgatacctacatttgggcggtagccatcgtcatcaatcaccggactacctcaacataaaccttatatatgaacgattgtttcatactccagtgaggcggtaaaccactctgtaatagtgacacagcctaataacaattgaataactcacagtaaatagccgagttataaacagatgatgacgcccttgcgccattttattcaccttttctgtggatatagttgtgaagaagtatggaattaccacgggaaaacccagaacagtctgaattcctcatgctggagacagtaaaaatagtgccttatattcattgcgttatagacaaatcttacatgctaccttcataaagcgtgaccagcatcacatctaagatccttatgctgatgaaagatcaaccagcgtcggttttatccacagattgtgccaataacttacgcactatttgtctgaattttcgattttcgtcgcacgtcaaggctgtaaatggaaacagtagtggcggttttacacagttatcccaactttctgtggataacatagtgtaagatcctgtttattgtcagtgaccagaattggaaaacccgcttcagcgttgcgcaacacgaagaaacaacacaaaaaaggcaataaaaatcagtctattgaatataagacacagaaaaagataaactctgcccatacggtataaaatcactgctcattttttaatctaaggtaatggtaatgtccgctctttgtccgctactgactccgcctgcttcggaagcattgctgttagcccaggcgcggcagctttccggctatacgttaggcgagctggcggcgatggccggcattaccacgcctaaagatttgaagcgagacaaaggctggatcggtgtcttgctggagatctggctcggcgccagcgccgggagcaagccggagcaggatttcgccgcgttaggcgtagaactgaaaaccatcccggtggatagtctgggtcgtcctctggaaacaacctttgtttgcgtggcgccgttaaccggtaacagcggcgtgacctgggagacaagtcacgtacggcataaattgaagcgcgtgctatgggtgccggtcgaaggcgatcgcagcataccgttagccgaacgccgcgtaggttcgccgttactctggagtccgagtgaagaagaggacaggcagctacgcctcgactgggaagagctgatggacatgatagtgctgggccaggtggaacgcattaccgcccgtcatggcgaagtcttgcaactgcgacccaaagccgccaatgccagggcgctcaccgaggctatcggcgcgcgcggggaacctattttgacgctaccgcgtggattttatctgaaaaaaaattttacgcaggcgctgctggctcgccattttttattgcagaatccgtaacgtccattacacgcaaatgcgcctccgctatggctacgcgtcggaccgacgctcgataaacgtaagcgtattgtcgccgctattttacaccgttcctggttgcgcaaattcagcctgggctttcgcccgtcactcgacgggcctataattaccgcttctttttttggcaggactttgttcgatgttatttgcatggataaccgatcctaatgcctggctggcgctcggtacgctgacgctgctggagattgtacttgggatcgacaacattatttttctttctctggtggtagcaaaacttcccacggcgcaacgaaaccacgcacggcggcttgggttggcggcggcgatggttatgcgcctggcgctgctggcgtcaatcgcctgggtcactcggctgactaatccgctgtttgagcttttcggcgaagcgatttccgcccgtgatctcattctgttactgggcgggttatttttaatctggaaagccagcaaggagatccatgagtccatcgaaggcgaagaagaagggttaaaaacccgggtttcttctttcctgggcgcaatagtgcagattatgctgctggatattattttcagccttgattcagttatcacagcggttggcctctccgatcatctgtttattatgatggcggcagtcgttattgccgtgggcgtcatgatgtttgcggcacggcccatcggcgagtttgtcgatcgtcatccgtcggtaaaaatgctggcgctctcctttctgatcctggttggctttaccctgattctggaaagtttcgacgttcacgttccgaaaggttatatctatttcgccatgttcttctctatcgcagtagagagcctgaacctgttgcgtaataaaaagaatccgctgtaatcctgtctcgctcccccgccggggagcgaatactcactttatttcctttcttctcacagattaagattttgctgcttccgacatgcagagctgcgcgttattactagactattatcagacatatgattaacagactattatcagatgcaggctatgtgaggacaaacggatgaaaaagtgggcagttgtaatttccgcagtagggttggcttttgcggtatccggatgcagcagcgattatgtaatggcgacgaaagatggtcgtatgatcctgaccgatggaaaaccacaagttgacgatgataccggtctggtcagctataccgatgcacagggaaacgagatgcaaatcaaccgtgacgaagtatcccaaatcatcgaacgttaagcggtggcctgtgatcgaggtcagcgttctgcaagccttcaggctgcgtcccgtaacggtgcgtggcgaccacgcccggtaacaattacgccgcgcagcctgcaattttactttcccttttgccttccctctgccatttttattgtcctttgtcgggaatttctgacttcataataaaaaggaaacggctatgcactatcaccgtataccccacagctcgctcgaagtaagtacgctagggctgggcacaatgacatttggtgaacaaaacagcgaagccgacgctcacgcacagctcgactatgccatcgcaaatggcattaaccttatcgacgccgccgagatgtatccggtaccgccgcgcccggaaacacaagggctgacggagtcctatatcggtaactggctcgccaaacgcggcaaccgtgaaaaactgatcatcgccagcaaagttagcggaccggcacgtaataatgatcaaggcatccggcctcatcaggcgctggatcgtaaaaatattcgcgaagcgctacacgacagtttgacccgattgcagaccgactatctggatttgtatcaggtgcactggccgcagcgccccactaactgcttcggtaaactcggctataactggacggactccacgccagtagtaagtctgctggagacgttagacgcgctaagtgagtttcagcgagcgggtaagattcgttatattggcgtttcaaatgagacagcgtttggcgttatgcgctatctgcatctggcggaaaaacatgacctgccgcgtattgtcacgatccagaacccctatagcctgttaaaccgcagctacgaggtcgggctggcggaagtcagccagtatgaaggtgttgaattgctcgcctactcctgtctggcgtttggcacattaaccggtaaatacctgaacggggccaaacccgcaggcgcgcggaataccttgttcagccgcttcacacgttacagcggcgaacaggcgcaaaaagccgttgcctcctacgtcgatatcgcgaagcgtcacaatcttgatccggcgcagatggcgctggcctttgttcgccgccagccgtttgtcgccagtacgttactgggcgcaaccacgatggcgcagctcaagacgaatgtggaaagtctgcatctgacgttaagcgaagaggttctggcggagattgaggcggcgcatcaggtttatacctatccggcgccgtgatggtcagtgcccggtggcgctacgcttccgggcttacagagacaatgtaagcccgataacacgcactcgccgcccggcatattcactcagtatgatgcctgccggcgctgccagatccacagcgccgcgatcgccagcgcgaacagcacgccaaagccgatacctatcgccactgccggaacgccaaccagcaccgccagcgagtacagtcccagcattaatagcatggcgctattctcgcccagattttgtacggcaatggcattcccggcgccaacgctcttcttaccgcgctcctggagcaaagcgttgagcggcaccacaaaaaagccgcccagcatacctatcaacagcaacaaggcataagcaggcagcaatgcgtgctgtaatgagaagatcgcaaccacaacgccaatcaaaatcccggcgggcatacagcgcgatacggtctccagcgtcaccagttttgccgccgcgcccgcgccgaccacaatgcctaccgccaccatggcgttcaggtaagtcggcgtggcgttatccgtaatccccagcgccaccggcacccacagcaccagcagaaaacgcagcgtcacgcctgcgccccagaatagcccggtccccaccagcgaaaaacgcgtttcaccgttacgccaaaggacaacgcaagcgctgaagaaactacgcgtcatcgccgacaaccgccaggattgtcctggacgcgccgccacaagcttcgggataaacaggttcgccgccactgcgccagcgtaggccaacgcgcaggcaaccagcgcagcgatgacatgccagtcggccaatacgccgcccgcgacggaaccgagcaaaatcgccgcaatcgtagaggcttccatcaggccattggctttcaccagcttatcgcccgtcgtcagttcgcccagaataccgtatttcgccggagaataagccgccgcgccaatcccgaccaacgtataaccgacaaaaggatttatgccgaggcagatacctgccgctcccgccagtttaagaccattggcgaccatcatcacccggcctttggcaaagctgtccgctatctggccgacaaacggcgcaaaaagaatgtaagcgcccacaaacaccatttgcaaaacaggctggctccagtccgggtaaaactgagctttcagcagtgccagcgtcgcgaacagcagcgcattatcgccaaaagccgagagaaactgcgcgacaatcaccgacagcatccctttcgaccagatggaggtgttagtacgtactgactcactcatgatgttgttccggcgcatccacccaacttttcagcgtcacaaaatcgggtttcccgctgccaagcaagggaagctgcttcagataacggatatcacgcgggacggcaagttccggaataccgtgttcacgagcatagtgctgtaacttttctcgggtgagttcgctgtcagtcgtaaacagtaccagcgcttcacctttgctggcatcgcttttaatggcggtagcgtgcattttgtccgccgaaacgccaagcgccagttgctcgaccatctccagcgagaccatttcgccagcaattttcgcaaagcgtttcgcgcgcccctgaatctgcacaaaaccattttcatcgaagcgtacaatatcgcccgtgtcgtaccagccgcgctcagtttcgcctctggagttttccgccgacggcacctccagcacgcccggtttttccacgcgcagatagccattcatgatattcggccctttcagctgtagccgaccgccgttttcaataccgggcaccgccagcagacgcgcgtccatgccaggcagaatgcggccaacagtgccaggcttagccgccatcggcacgttaatcgagactactggcgcgcattccgttaccccgtagccctcaagaatgcgcagaccgaatttatcctgccacagttgtttggtgctctcctgaagtttttccgcaccggccaccacatagcgcaggcgataaaaatcatacggattggcaaagcgcgcatagttgccgaggaaggttgacgtaccaaacagcacggtacagttacggtcatagaccagttccggcacaatgcgatagtgcagcggacttggataaagaaatacttccgcgccggtcaacaacggcgtaaacaggcccaccgtcaaaccgaacgagtgaaagagcggcagcgccgacataaaacggtcattggcggtgaaatccgcaatcgtttttatctgctcgacgttcgccagaatgcttttatggctgtgcaccacccctttcgggtgcccttccgagccggaggtaaaaagaatgatcgccgcgtcttccggctgctgttttacctgcgccagtcgcggcgccaggaggtgggcaaaaatccacagcttgtcggcgggtgtgacgtccgcttttaaatcttccaggtaaacccagcgaacctgcgttagctgttccggcaggtgccacaatttacctttatcgaggaactggcgggaggtaaaaatcgttttaatttccgccgcggtaatcgcgctggtcagcccttttacccccgccgtgtagttcatcatggccggaatgcggcgacgagaaaccgcgccgaaaatcaccgccgcgctgatggcggcattcggcagcattaaaccgattttctcgccctcaacgctgtacttttccagaatccggccaacaaaaagcgtcttggtcagtaacttacgatacgtatccggcgtaaagttaatgtcctcaatacagtttttacccgcgccgtaacgatattgcgccgccagcaacgattcgtataacgtctcgcgcgggcgcaccgccatacgcgcttccatcatgatctggtgcagcatctcacccgctatcttacgtctgtcgcgcgcgcgcggcgcttccggcatcggtatttgcgtcggcggtaaaatatgaagctgaatgcgggggaataagcgccgtttaaccagacctttcaggcgactgaaaggggtcagctccgcgccgtcaatgcggagcggaatgacggttgcgcccgattttgccgccacaaagcctgcgccgtcataaattttcatcagcgagccggtcacggaaatccgcccttccgggaaaatcaccactggacgcccctgttccaccagacgcaccaggtgtttaatggacatgggtttagtggggtcgagcggcacaaaatcgatcagcggcgttaaccagcgcatataccattgctggctgatggaggtatataccgcaaagacaggccgtaccggcaaaaacagcgccagtagcataccatcgataaatgaaacgtgattgggggtaattaagacccggttcccctgtagcgcccggacatcgccagtgacgcgcacacgataaagcacgcgaaacaggttacggaaaaatccaaacagcatttcaactccctttggccgacaattcgctaaaagatgaattgtggcagattacacgagttgcgtaacaggagcgatagcaaaataggttcgaaaaaaaacctgcgcatccgcgcaggttggtgcaagagacaggtacgaagagcgtaccgaataatctcaccaatcaatacctctgggatcttgattgtgggcttcgcgcgtctgcatcgccagtccgaaaacgcaaaggaataaacggaaatgcaacgagttgtgtaaattatccgttactgttacaggttcaggcgaaacaaaaaaaaacctgcgcatctctacgcaggttggtgtaattcgtgtgatcaacaatgacgttgattccacctatcaatacctctgggatcaccactctatcaacctgactcgctggcctgccagcagacaatcgcaacagcgcttcgcaaactgtaacgaaagatttgtattgtcactttacagacgcatttctcccgtgcaggtcacatttgcccgacacggcggggcaagaggcttgaacagacgttcattttccgtaaaactggcgtaatgtaagcgtttacccactataggtattatcatggcgaccataaaagatgtagcccgactggccggtgtttcagtcgccaccgtttctcgcgttattaacgattcgccaaaagccagcgaagcgtcccggctggcggtaaccagcgcaatggagtccctgagctatcaccctaacgccaacgcgcgcgcgctggcacagcaggcaacggaaaccctcggtctggtggtcggcgacgtttccgatccttttttcggcgcgatggtgaaagccgttgaacaggtggcgtatcacaccggcaattttttactgattggcaacgggtatcataacgaacaaaaagagcgtcaggctattgaacagttgattcgtcatcgttgcgcagcgttagtggtgcacgccaaaatgattccggatgcggacctggcctcattaatgaagcaaatccccggcatggtgctgattaaccgcattttaccggggttagaacaccgctgtgtcgcgctggatgaccgttacggggcatggctggcgacccggcatctgatccagcaaggtcatacgcgtattgggtatatctgttccaatcacactatctctgatgccgaagatcgcctgaggggctattacgatgcgctggcggaaagccatatcccggctaacgatcggctggtgacgttcggcgaaccggatgaaagcggcggcgagcaggcgatgactgagttattaggtcgcggcagaaattttaccgcggtggcctgctataacgactcgatggcggctggcgcgatgggtgtattaaatgataatggcgtgggggtgccgggcgaagtatcgctcatcggttttgatgatgtactggtctcacgctatgtgcgtccccgactgaccaccattcggtatccgatcgtcaccatggcgacacaggcggcggagctggccttagcgctggcagggaaatgtcctacgccagaagtaactcatgtatttagtccgacactggtacgccgacattcggtgtccacgccgacggataccgggcacctgtcgacaaccgattaatcagggtagcatgatggcgacaatgctggatgtttcccgccatgcgggcgtatcaaaggccaccgtctcacgagtgctgaatgggacggggcaggtaaaagaaagcacgcgccagaaagtgtttacggcgatgcaggctctgggctatcgccccaacctgctggcacgctcgctggcgaatcgcaccagcaacagcatcggtctggtcgtctctacgtttgacggcttctatttcggcagtttgttgcgccgggcgtcgcgccaggcggagtctcataacaagcagttgatcgtcaccgatggtcacgatacgccggaacgagagcagaaagccgtacaaatgttggccgacagacagtgcgacgctattattctttacactcgctatatggatgagctggcgattttgtcgttgattgacgccacggaaatgccgctggtgattattaatcgcaacgtcactcaggcccgcgatcgcgctattttcttcgagcaggagacggcggcattccaggcggtggaatatctgattacgcagggccatcgcgatatcgcctgtattacgctgcctgttcatactcccaccggcacatcacgcgtagcgggttatcgcaaggcgctggaaaagtatggcattccctggcaaccggcaaaagtgaaatacggcgattacacgctgacgcgcggctatgacgcctgccgggaattactggaggaaggcgtcacgtttagcgcgctattcgcctgtaatgatgacacggcgctgggcgcggcaaaagcgctgcgccaggccggattacgcatcccacaggatgtgtcgctgtttggttttgacgatgcgccgggcgcaacctggcttgagccggggctttcaacagtctatttacccatcgaggctatgatagccaccgcgatcgatcaggccgttcgtctggcgaacagcgagccggtcgccccgatcccgccctttaccggcacgctgattctgcgcgagtccgtcgccgcgggcccgttttttcaacgtccggcctaatgatgcgcttcagagcatctccagcgctaacagctcttcaatggtttgacgacggcggatcagccgcgcctgtccattgtcaaacagcacttccggcaggagcgggcggctgttgtaattcgatgacatagacgcgccgtacgcgccggtatcgtgcaatacgaggtaatcgccggggatgaccgcaggtaaggcgcgtgtttcaaccattcccccttcctgctgcgtaaaaacatcgcctgattcgcatagcggcccggctaccaccgtctcgacccacgggccattttcaagcgcgcgaccatccgccgccagcgccgaaatacggtgatagctaccgtacatcgccgggcgcatcagatcgttaaaaccagcgtcgaccagcacgaaatggcggcttcccatctgttttacgctacgcacctgcgttaccagcacgcccgattgcgccaccagaaaacgtccaggttcgatctcaagtttgaccgcatgtcccagatggcgggcgatttgctcgcgcgccgcgttccacaggccatagtaatggcgcgtatcaacgggctcttctccctcacgataaggtatcgagagtccgccgcctgccgaaatcgcctccacatcctgaccacattccagcacctggcgtaccatcgcgccgcaaacctgctccagatggccataatcgacgccggaaccaatgtgcatatggataccgacaagtttcagtcggtatttctgcattaccgccagcgccgccggaagatcgctatgccagatgccgtgtttgctgttttcgcccccggtgttggttttctggctgtggccgtgaccaaagccaggattcacgcgcaaccagacgcgatgcccaggcgaaacctgaccaagctgcgtcagcatatctaccgagccggcattgaccggaatatgcagttcgctgacgcgcgccagcgtggcggcgtcaatcacatcggcggtaaaaacgatatcatcagggcacgtttgcggatcgtagcccgccgccagcgcacgttcgatctctcccaatgaaacagaatccaccttgacgcccagcgcgcgcattaagcgcaggatatgaatgttcgaacaggctttttgcgcaaaacgcacgacgtcaaactgctgcagggcggctatctgacggcgaataatgtgcgcgtcatagacccagaccggacagccgaattcagcaggcaatctgagcaaattttcagcgttaaggtcagtttcagcgtgataatgcggcaatgacataacaaactccggaacgggctttttaacgattacgccataccttagaaagaataaaaaatatcgttttattgtcagtctatgcaaaaatgatatgggataaatgattcagggaaacgtatggctgccgttaatttacgtcacattgaaatttttcatgccgtaatgaccgccggaaatctcaccgaagcggcgcggctgctgcatacctcgcagcctaccgtcagtcgcgagctggcgcgttttgagaaagtgctgggattaacgctgtttgagcgcacacgcgggcgcttacatccgacggtgcaagggctacgcctgttcgaagaggtacaacgctcctggtatgggttggatcgcatcgtcagcgcggcggaaagtctgcgcgagttccgtcagggcgaactctctatcgcctgcctgccggtcttttcacaatcctttttgccgccgttactaccgccttttctggcacgttatccggatgtcagcctgaatattgtgccgcaggagtcgccgttgctggaagagtggctctccgcccagcgccacgacttagggctgacggagacgcttcatgccccggcaggaacaacccgtaccgagttactaacgctgaatgaagtgtgcgtactgccctgcgaccatccgcttgccgccaaaacggtactgacgccagacgattttcagggggaaaactttatcagcctctcccgcctggacagctatcgacagttgttggatacgttatttgccgaacatcaggtgaagcgcagaatggtggtggaaacgcatagcgcggcctccgtctgcgcgatggtgcgcgccggggcgggcgtttcgatcgttaacccgctgaccgcgctggactatgccgccagcggcgtcaccgtccgccgcttcagcattgacgtgccctttaccgtcagcctgattcgcccgctacaccgccctgcctccgcgctggttgacgccttcagtaagcatttacaaacgcacctttcgcgcctggtcgaaccgctggaggttattctggggccgatgacgaaagcataaagctcacggcatctgcggcatgaattgccgtggtatcgaaaaccggtagcgcgctttgcgtctggggaacaagcaaacctatttcagtacagccaaaaataacgccctgcgcgccttgcgcagccagttgttcgataacctgtaaataatagtggcgcgacgcgtcagtgaatgtcccctgacagagctcgtcaaaaatcacctgattgatacgcgcccgatcgtccgcctccggcacgatggtctcaatcgcaaattgctgttccagccgcccgcgataaaaatcctgttccatcgtatagcgagtccctaatagcgccacgcgatgcaacccctgacgggcgatagctcgcccggtagcatccgcgatgtgtaggaaaggcagagaacaacgagattcaataacgtgcgcgattttatgcatggtgttggtacacagcacaatgccttctgcgcccgcctgctgtaacccatgggcggcctgcgccaggatatcgcccgctttatcccactcgtcgcggcgttgacatacttcaatatcgtggaaatctacgctatgcagcagtaagctcgccgagtgcaggcctcccaactgctgtttaataccttcattgattaaacggtaataagggatagtcgattcccagctcatcccccccaacagtccgatcgttttcactgcgctctcctttttgtaaagcattatggcagtgaagcaaacttacacatccgtttccagtctatttttcatcatgccggataacaggcgtcatccggcatgggaggggggattacacgccaatatttcttagcttctcgcccgccatcagcttgcgttcgatgtgctccagggtgacatttttggtttccggaatcagccagaaagtgatgccgataaaagcgatattcagcgcggtgtagagccagaatgtacctgccgcgccaatgctgtccaacagtgtcaggaatgtcgcgccgatgatcatgttcgatacccagtttgtcgtggttgaacaggtaatgccaaaatcacggcatttcagcggctggatttccgaacacagtatccacaccaccggagcggcgctcatcgcgtaaccggcgatacacatcatcgtcatcccaacggaaagccaggagagaccgcttgatgccgtaccgttatcaaactgcatcaggcagtagcccaacaccaatgtccctaacgccattacgctgaaaccgatttttaacgccggtttacgcccggccttatcgaccgtaaagacggcgataaacgtcgcgaacataaaagtcagtccgaccaccagcgtggcgatcatttgctgttccgtggtggtaaagccggccattttaaaaatgcgcggcgcatagtacataatgatgttcatgccggtgaactgctgcattgcctgtagcagcataccgaggaacacggcgcggcgaacattgcggttagctttaaataatgcccaccctccctgcttgagtttgaggctttcccgaatctcattcagttcatcacgggctttttccgaggtatcgcgcagcatacgcagcacctcttccgcttcaatatggcgacctttttgcgccagccaacgcggactattcggcaggaataccaccagaataatgagcaacaccgcaggcagcgccagcacgcccaacatcgcgcgccagttgccgctgtagctgaatgccgtatcggataaaaaagccagcacaatgcctaacgtcaccatcagttgatacatactgatcattttgccgcgaacattttcacttgccatttcagagagataaagcggcgcggtataggaggcaatccctactgctacgcccagtatcacgcgggcgccaatcaatacttccacgctggaagcaaacgccgaccccagcgagccgagcacgaacaaaatcgcgccagccatcaggctatacttacgccccagccggaatgaaagccagccgttaaataatgcgccaattgccgcgccaagcatcatgctgctgacgacccattcctgcagccggctggtcagtacgaaatggtcggtaataaaaggcagcgccccggcgataacgccgatatccagaccaaataacagtcccgctaccgctgcagaaaccgaaacaaacatattcatacgtcgtgtgtcgcgaagcgaacgcggcgttaaagcagagtcatgattaatagagaccatattttcctgccacaacagagtaagacatagcctgaaagtacgggatactcttcctcaagtgtcaggctggaaacggcataaatatggattaaatggctacgctatagcgatatgtgatggatattacactttttaaatttaacgccgttgccgggtatttttttaaaccaccaatatttcaatgaattaaagcattgatcatagctattatttaacaatatatggattaagttaaacccacaatatggactatgctaatgagatcataaaaaaaccctgtacgaggacagggctttatcagttttttcggccaaagcgtcgattttcccagaaacgcatttgtcagtagcggattaacgcgccagccaaccgccatctaccgctatggtatagccgttaatataatcagcggcgctggatgccaggaagactaccggccccattaaatcgcccggtagcccccaacgtccagccggaatacggtcgagaatttcggcgctacgttgtgcatcagcgcgcaattgctgggtattattcgtggacatatagcccggtgcgatggcgttcacattgatattgtgtttcgcccactcgttcgccatcagacgtgttattcccattacgccgcttttcgacgcggtataagacggaacgcgaatgccgccctggaaggagagcatagacgcgatattaataattttgccgccgttgccctgggcaataaaatgttttgccgccgcctgagacataaagaacacgctcttgatgttcaggttcataacgtcatcccagtctttttccgtgaaatcaatcgcatcttcacgacggatcaaacccgcgttattcaccagaatatcaatatgaccgtattccgccaccgcccgttccagtaatgccggaatgccatcgatttgacgcagatcggctgtcaggcttaaaaaacgacgtcccagagcggtgacgcgcgcaatagtttccgtcggttcaacaatgttaataccaacaatgtcacagcccgcttccgccagccctaacgccatcccctgccccaatccggtatcgcaccccgtcacaaccgcgactttaccttcaagagaaaatgcattcaaaatcattgttaatccttatttttgtcatgcctgtcacgcacaggcgttatcaccggtcgcgactagcgcagatcttgtaccgcaacgtgatccatgtcatcgaagacctgattttctcccaccatgccccaaacaaacgtataggctttggtgccaacgccggaatgtattgaccagcttggggaaataaccgcctgttcattacgcatcacaatatgacgggtttcctgaggctgccccatcatatggaaaacgcaactgtcctcttccatattgaaatagaggtacacttccatacggcgctcatgggtatggcatggcatggtgttccatagattgccgggcgccagttcggtgagtcccatactgagctgacaggtttccagtacatccggtacgaaatatttattgatagtgcgacggttactggtgaggttatcgcctaaggtgacgggcgcaacgtcggcaggcgacacttttttcgtcggataagcggtatgcgctggcgcgcagttgtaataaaacttcgccggtctgctcgcctcattgctgacgaagaccagctctttcgcccctttaccaatatacagagcatcacgatgaccaatgtcatggcgctgcccgtcaatgataatggcgcccgcgccgccaatattaatgacgcccagctcgcggcggtccagtaatcgggaaacgccaagctgtttacctacttctccgccgatttcaacgggatggctgacgggcataatgccgccgacaataatacggtcgatatggctgtagaccatcgtatattcatcagcgacaaaaatattttctattaaaaactcgcgtcgcagcgcctgggtgtccagcgttttagcgtgctcgctatggatactttgccttacgtccacttttccctccaatgataaatcgatcgcaatggcacaaaatcaaaacactgttttgatttatttaacggcatcatagtcgcctggataaaggttttcaacaataaataaaacaacgtttcatttatatggttggttatttttaaaactgctgtagcgatcacgatcggcgctaaaacttacgcatttgtctgattttcagacatgcgcgccagatgctgtatgcggttacccagataaaaattggagcttgttttagaacgaggtctgatgtgcgaattgaattaaaagcggtatgcgtctgcaatgcccgacgcggcaagacgttccgcgctataacgaaaaagggggttctgtcactggctttgccctcgtgatagagggctttttatgacggaatactgaaacaggaaaaggatggctggcgcaggatcagtcgcgttcaatggttaaagcaacgccctgaccgccaccgatacacagcgtcgccaggcctttacgcgcgtcgcgtttaaccatttcgtgcaccagtgaaaccagaattcgacagccggaagcgccaatgggatgccccagcgcaatcgcgccgccattaacgtttacccgtcgctcatcccattccagcatttttcctaccgataacgcctgggcggcaaacgcttcgttggcttcgataaggtcgacctccgtcagttgccagccggcacgctccagacagcgccgggtagcatataccggcgcaatccccattagcgcaggatcgacgccgacgctggcaaacgcgcggatgcgcgccagcaccggcagccccagcgcctgggctttcgcctcgctcatcatcatcaccgcggcggcgccatcgttgattgaggaggcattacccgccgtcaccgaacctaaactatcaaacgccggatgcagcagggctaacccctccgcactggcgtcggcccgcggttgttcatccgtatcgacaattgcggtctgcccattacgttgcgtgacgatggggacaatctcatctttaaaacgtccggtatcaatcgcggccctggctttttgctgcgaactgagcgcataagcatcctgtaactcgcggctgatgccatattcccgcgccaggttttctgccgtcacgccaatgtgataatcgttgaaggcatcccataagccatcatgtaccagactatccaccagattgtcggcatcaggcaacgcgccgctacggctgtcattgaggacatgcggcgcacggctcatattctcctgcccgcccgcaataacaatgtccgcttcgccgcactgaatagcctgcgtcgccaggtgcaacgcttttaaaccggaaccacaaacgtcattaatggtaatagcggaaacggtagtcggcagccctcctttgatggctgactggcgcgccggattctgcccggcgccagccgtcagtacctgaccgaggatgacctcatcgatagcgttagcgtccacgccggtgcgctcaattaacgcttttacgaccatgctccccagctcgacggcggaatgacgggccagcgttccctgaaaacagccgatgggtgtccgtaaagcccccactatcacaacctctttcattaccacctcagcgcaaaatgacaccgccatagtagagcattgttaaaattagttttcttgattgtttaaaaaaagtgagttttatcacaaaggaaatgacgctgatttgacggtgacgcagcttatttctgctgcaaatggtagcgaagccagttccccgccgttccgggcggcgttttcttgttccacagcaaatcaatagcaatcgccctcggccagccaggaacatccagctgcgccagcggtttttccgccgcaaactcttccaccagcgcgcagggcaatacgcaccagccaaatccctgaaccgccatgctcaacagtaataaatagtttggcgctgaccaggccgggccgcgcgtaatgttggcgttagagtcaagataggtattcagacgcagctcgcgccaggtatgcagttgctcccattgcaggttcgtctgtgacgccaacggatgcgtggtcgccacataaacccccatccagctttgaacaggcagacgcgccgcgccaatgtctgtgggatagtcatcacgcgcttcaatcaggcctatctgggcacgccctttttgcagcaggtcgatgacatcatcattttctccgatcaagcattcaaactcggtatgcggaaattgacgatcaaactgcgccattaactcttccagactgtcagggtgcagggtatcagagaggacgaacgtgagtcttgcctccgtctcgccggataacgtcagcgccacctcatccagacggtcgctcgccgataaaatagcctgaacatagctaagcacccgttttccttcttcggtcagaacgggctggcgcgaagatcgatcaaataatgaaaatcccagatccgcctccagatgcgcaatggcgatactaatggtggactggcttttacgcaggcggcgcgccgccgcagaaaacgaaccgcaagagacggtctcaacaaatgccattaaagcttcaggtgagtaacgcataacctatctactttatcgatggatgttatcttttaggtatcacattaaacgataaaatagcggaaatttctttagcttgattaagagtaaggttttttcgtttatgcaacatgacgccatacaacgtcgctcgctgccggagcgtattttccatgctgtctgttttgaaggtattgcgactgcgatactggcgccaacgaccgcctggctaatgcagcgctcggtgctggagatgggcggcctgacgatattgctggcaacgacggccatgatctggaatatcatttataacgctctgtttgatcgactgtggcccgcgcatcaggtgagacgaaccgccaaagtgcgcgcactccatgcgttaggatttgaaagtgggtttattgtcattggcgtcagtattgtcgcttgggtactgaatgtcagcctgctacaagcattcaccctggaaattggtttcttcctgttctttttgccgtacacgatgctgtacaactgggcatacgatgttttacgccaacgaatagtgactcgccgccaacagcgcgttagtgcatgatattgctcttttttgccgggatcgcaacgctcccggccctccgcctccacgacatccatctgcttaaaacgcccccaactgacgctatttatggtaaattgcgcttctttttgtgtgttttatagttgataaattcaaataatgtctaaaatttggtcaaaagatgagactctctggagttttgcattatacggaacggctgtaggcgcaggcactcttttccttcccatccagttgggatcggcaggcgcaatcgtgctatttattaccgcgctggtcgcctggcctctaacatactggccgcataaggcgctgtgtcagtttattctttcctcaaagacttctgccggtgagggaattactggcgccgttactcattattacggcaagaaaatcggcaatattattaccacgctttatttcattgcgttttttgtcgtggtattaatttatgctgtggcgattaccaattccctgacagagcaattagcgaagcatattcagatagatattcgcatccggatggcagttagcttcggcgtagtacttatcctgaatatgattttcttaatgggaagacatgccactcttcgcgtaatgggctttttagtctttccacttatcgcttacttcttgttcctttcgctctacttaaccggaagctggcaaccctcgttactgaccgggcagatgtctttggatagtcacacgttgcaccaggtatggatttctattccggtgatggtttttgcttttagccatacgcccattatttcgacgtttgccatcgacagacgggaaaattttggcgatcaggccatggataaatgcaaaaagatcatgaaggtcgcctatctgattatctgcctgagcgtgctgttctttgtctttagctgcctgctctccattccgccgtcatacattgaagacgcgcgcaacgaaggcgttaccatcctttccgcgctctcgatgatgcccaatgcgccggcctggctctctatttccggtattatcgttgccgtcgtggccatgtcgaaatctttcctcggcacctatttcggcgtcatcgagggcgcaaccgaaatggtaagaaccaccctacagcaggttggcgtaaaaaaaagccgggcgttcaatcgcgcgctgtctatcatgctggtttccgggattacgtttattatttgctgtattaacccgaatgccatctctatgatttatgctattagcggcccgctcattgcgatgattctgtttattatgcccacgttgtcaacgtacctgataccggcattgaaaccctaccgttcagtaggtaatttcattacgttggtcgtcggtttactttgcgtatcggtgatgtttttcggctaaagtaaaagatagccgggatataactcccggctattttatataagaatccagcacctttaatattacgtccagatcttcttcacgtctggcttcatcactctgatgaacgatatgctcggtcagatgacctttaatcacctcgcgcattaagccatttaccgcgccgcgaatcgccgcgatctgttgtaacacggccgcgcattcatgcggttcatccagcattttttttagcgctatcacctgtccctgaatcttgctggttctggctttaagcttttgtttgtcccggatggtatgtgacattacaacacctcactaacattaacgaatacaaattatagcattacgatgctactggggggtagtattctatactgggggggagtagaatgacgcccacataaaacaactaagaatcattctcatgggtgaattttcgacacttcttcagcaaggaaacggctggttcttcattcccagcgccattttattaggtattttgcacgggcttgaaccagggcactccaaaactatgatggcggcttttatcattgccattaaaggtacggttaaacaggccgtcatgctcggtctggcagcaacgctttctcataccgcgatcgtctggttaatcgcgctgggtgggatgtatcttagccgggcattcaccgcacaatcagtggaaccatggctgcagttaatttctgcgattattattctgagcaccgcgtgctggatgttctggcggacatggcgaggcgagcagcagtggctggcgggaaaccaccatcacgaccacgaccacgaccacgaccacgaccacgaccacgaccacgaccacgaccacgaccacgaccacgaccacgaccacgaccacgaccacgaccacgaccacgaccacgaccacgaccatcatggtcacatacatccggaaggtgcaacgtcaaaagcgtatcaggatgcccatgaacgcgcccatgctgccgatattcaacgccgttttgatggtcaaacagtgactaatggacagatcctgctattcggcctgaccggagggcttatcccctgtccggctgcgatcaccgttttactgatttgtatccagcttaaagcgtttacgctgggcgccacgatggtgctgagctttagtcttggcctggcattaacactggtgacggtaggcgtgggcgcggcgataagcgttcaacaggcagcaaagcgctggagtggtttttcgacgcttgcccggcgggcgccctatttttcgagcattctgattggtctggtcggcgtgtatatgggaattcatggctataccgggatcatgcagtaaatatgtaacgcttctgctcaggccgtatcattcacgtcgggtttcattccagaagcgtttttacttatcaaacggtatgaaaggccatacattcagcgtcccgcctgaattctgtattttactccactacaccacaggcaaaaaataccccaccgccaccgggtttagccggcgtgtcagtgtttctggatagggtcgccggaggcgggttattgcggagcgataaacggggttcgctgcagtgatttacaaaaccgggtaccaaacagcagttcccgtaatcggttccgcattcccagcttcaccagtaaccggtatttgtcctgccagatttgcttctcctgtgtattcagccttccacacaacgctgacaaccttcctcgtccacggtaaacttcctgaagcaagcgtaactgggccaggctcactccgcatgccagtatctcccggtgcatcaactgatccatatagttcatcaaccgcttcggattgttaaatatcggtggcacttccagaaagcccgtcaccggatccggagataacaaaaaggcgtccagcgctcctgtcctgcgcaggcgtgcgcccccggcccactgttcatcccgccgccaccgaataagtatctccgccagttcctgctccagcagcgccgggatgccgccgtataccttcagtaccacccggtcgctgaaaaacagctcatcgctgataatcataaccgggtagtccggcagtatctgtctcagggaatagaacaaaaagagatgttcacggggacgcagacacagtatcagtatggcctccggtttccgacgtaattgctgcaacagaacaggctgcctgtatgcggtttcacagttgcagcccggcataaatctccggaccaggtgtgccacggcgatcgtcaccggccagcagtcaccgtaaacgataatctgccgggccggtatccggttatgttccgtcatcctcatcctccttctttttcaggatcttccccgcatttctgttactgcacagccggttccacagttcatttgccatcgacctgtcaccattaccgacccggcgttttgataccagcggcggtccggctttttcacggcgcgtggacggggtgggactgtcaagaacccggataacataaatctcatagcgtcgtgctttattaggcagggtctggtgacggcagatgctgaccacccgcgatgttttgcttcgcagataggcaatcaggtagctggcccgtctggccgtgatgtgaaacgcctctgctatctggttacgctgaacccagttctgctgcaacaggcaccagtgtgccacaatgatatacaggggctcgccggcatactggcggacacttaccggaataaaacaggcatcatggttggtctgtccgggataatgaatatcgttaccaggggtaaggtactgcttttttgcgtgtgtattatcagggcacataaaacctctccataactgggtaaatgatttcccggaggtgaagaacaactcttaaatagtatttattattaatgtgtgtttattcgggattagttccccgataactcagtcagttcttttatttttattatctgcccccccgattagttataggtaacagtaacgggtattgcagcagaaaacgttcctgtctttacacttccccccggggtcggggttattactgcagtatataccttcgacacattaccggtgacagctcctgtaatagtaatatcccccagtacttcttgtttatcaaaagtaatctcttttcctttatcatcttttattgaaagccggagcccattaggctgacctttgttggggccatccaggctgacaagattcagagtttgcccggtatcctgtgtcagtgcacctttcccgaaggtgatggccagagggatcgtgaattcctgtcccatagccggtcgtaaaacctgcctggcgatcactgtaaaatttgcctgtctggtctgtgaaggttcataagtcgtataaatatgcccaaagttgacctgtaatggaacaatgtcaactttacccaatccgtttctgagaattctcacattaaaaccagataaaacaaatccgttttgtctcaaagaataagaaaaaggtacaatatttaaaacattacttatccccgtaaaagctgtaactgcactactctctgaatatgcttttgtatataagaaatccagtgttatccttacttttcgttctgtagtcccaacaggtagttttgtgccaaactcttttcgtaactcatttcctgactgagtactctttatttcatcccaggagaacgaaacaacacttgaagcatttcctgtttcttgaatggacattctgaatccaagtcccatcgcatctagtgtcttggtaaatttactgaagtagccctgattaaataccagctgtggaaattgcgtgtcatatcccatgtaacatttaaaaactgcatcctgattgattgtatagataaccgaatccgggccaggtttaaaatcatcggttgtcaaatttatacttcttaaattaatattctgaccggaagtgactgcacattcatttatacctagctcaaccgcatacactttagtcacacataaagagcacaacatcatcaccagcacggtcagttttgttttcagattaaaaatccattctgtcatgatgtcgcccctgcgtccttaaacgcgcagttcagggcatcgcaggtgtagcgattcatctgcagtcccccgtaatcatcaatataccccacccacagcgtccgggtttctgccggcagaacagcctttaaaggcaggttccccaggggcggcaccatcacgccctcgcggaaaccgctgagcctgtggctacggtctgctcccagccacgccacagtgatgtagtacggcgtcgggtttctgagggtcagatgtcccgcattccgctcagcagtcagctttctttccggctggtcactgctgcttctgataatggctttcggacggtaaaacagtttcagctggctctgcatggccagctgcaggacgttgtcgtcttccggcttcgggggaacgccccgcacgttaaaccagaacagtgtttccctgtcctgagggagcttatctgtcagcccgcgaacctgggtgatacggacctgggatttctgtccggcatcaatacgctgcagcggcggcagcgccatcagcgcatcggttctcaccccgtcagcatccgtcacccaggactgcgccaggaacggcgtggttttgtcatcgttattcagcgtgatggccaccgttttctgcggcgcatccatgataatacgggtccggtcaacattgacggccgccgggctgtactggctccatgccgccgccagtgcgagtaaaatcacacggcttcttctgctgtttttcacctgttttctcctttagacctgctctgtgacagggatatttttatctgcagggcagtaacagcggcccccggctgagtgtcaccgtttccggcagggtgagtctgcactgcacccggccatcccaggacacattcagggtccggcggtcttccccgctgagacctgtcaggtaggccagaccgccatctccgaccatccccgcggttctgccggttttcccggacaccaccagggcgccaaacggcggacttgcgccatcagccagccggatatgaccgagcacctgctccccctggttggcgtcaatcttccggtagcccaccgcgccctccgtcagcacctggctgatgacggagctgctgacgtccacgtcctccggcagggcggccacatcaaccgaaatatcgctgcggcgatagctgctgccggcgctcaccacgcccaccccgaagcggttggtcaccccgctgttgccgttcaccggcacaccggccacgtctccggtatctatcatcatgcggggctcattcccggccatcgactggctgaaagcggcaccgtgggcggtggcagtcaccgagccgtaccagctcaggcccaggctgcggtactgtccgggctgcagggtggcgtccgctgccgcttggccccacggcagacggctctgcacgctgccgctgaagctgctgttgctgccggtgtcataacggttatgaccggcgctgatgttccatgtagtgtccgggttatggaaatcgctgtaattcacggtctgctgcaggccgccccggttatctttctgtacgctgtaactcacctggcgactgtctccccacgggatactgatggtggcgtagacctggttctggctacccccgccggtgtactggttacgggcaaacgacaccgaggccgagagtccctgaaggtcgccgagactgaacaccttgttgaggctgagcatgtagttattgttggactgtgcgttccagtaattgagccggcttaccgagagggccgcgctcatgttgagtaccggaacggactggctataagtcacggtgtagctctgtttttcatgccatgcatcgccgccgtcagtggtccgacgctgcaggtactccggcatggacagaaaatggcggtccgagaagcggtatccgacgaacgccagggtactgccggttttatcaaacgttttggcatagttgatacggtagctgtaaccggactgcttctgcccatgcggcaaccgcgcatctgagcgggtgacgtccgcagacagagcgcccaacagccccatattctggccgatcccgagcgccgcggactggtagtcgccggtggaggcaatgaggccgccatacagcgacgtgttgttaaatgctccccaggtggcctccccgagcagaaagtcagggctgaccgtgctgttgttatgcgtcccgccgtacagcggacgtccggcggccaccttatagcgaacctgtccctggcgtgccataaaggggacgctggccgtgttgacctgccaggtccggacgctaccgtcgctttcccggacgctgacatccaggttgccgctgatattctggctcaggtcgggaagctcaaaaggccccggcgacacccgggtctggtacagaatgcgaccattctggctgacggtgacctgtgcattactgttcgcaatgccgctaattttcggggcatacccctgaagagagggcggcagcatgcgctcatcgctggccaaagtgagcccggcaaagcggaaggagtcaaaaatagcggagctgaggtacgtctgtccgagcgtcagttttgagcgcagtgctggcaaggcacggaacagatacgtctgcggcagataaaaatcggactgtgatgcgccctgcccactgtcaaaacggctgtactggtaatcgctccgcaatcgccaggcgccgagattaaacccggcggtgccgtagaggctgtagctggtagaggtttccccctgctgcggcatatagcggttgaccatcaggctgtaatcaagcaggccggcggtgacgccgtcgctccagcgtgaagggggcacccagtccgggtcctgataacgcatccaggcctggggaataatgaaggtcagacgctgattttcagcgctgtaccgtacctgactgtcagcggagcgcagctcaaggcattgcccgtccgggataccggtaacgggtttcaggccatgaataatcttatccttaagacccagcatggccaccatgtctgttgtcacacagatgacggccgcgtcgagtccggcaaccggtacaaccctgaccggatactgttcccgtaccggctggtcattgagccagatatcgagaatatagttaccgggcgccacatacccctcgcggctgaaggccgtgaggtccacgttagacaggttcccgctgtccagcaggctggcattgaactccgtggcctgcgacttcaggacggaaaatgtcagggtaatcagaatggcaagccgggtaattttcatggcatggcgctttcgtgttgtcgtccgtgtaacagacagcccgcaggcacagtcagatataaaagccgtccgatcccctccgtggacggcttctccctgtcgttatttaccgcgtgaaatcacaggtatttcagggtgtaggtgacggatgcgttaacatcgccaggagttgcggcatctgtcagggctatcaggcgggcaaagaagttgagttcgttattcccggcctgcagttgctgggcgtcgccatccggcatcggggtattgggtgtaatcagtgaggtgttgtcacctttcagaagctgcacaccaacatgctgggcactgccggtgctgacgtaagctttacctgaggtatctgctgtgccactgaaagagacggttactttagacattttccctgcggagccggctattgtagtttcattcggatcgaaggcgcagttctgcagatgaatggtgaacggttttgagtccgtggttgcattggcggtattcagtttacggtaagaaatctgtccaaacggaacggtgatcgcatcgtcgcccggtgcgatatcacagggtgagttggtgatggtaccagtgaaaagaattttacctgagccgaacgggcctgctgtgggtgtagtatcggcggcaaatacagaagcaccatacatcataccggcagccgccatggcaagtattattttattacgcatagataatatgtcctttgggtgaatgagaattattttgcaaaggctgaaaacaactctgagggtattaatgaaagcgttcagaaaagattcgtatgaataataaacgcctggtgttaaacgaagcacctgaactttccatcgaaaaatattgatttcagctaatgcctaatcagttgtaagaaaattcttattcaaattaaaacaataaaaatagatcgatacgatcgatgattatgatcgtaatttaagaataatcatcaaagaaatactttttaatgtaattataagcgggtgaatacctaacagacagatattcgcagcggacatgaaatattttgtaatatattatctggaatgtatgttttgcttttccattacactggatatttacaaaacataatactaatcatatataacaatgaaattactggtagcataaaaaactggatataatgcaagtaaaaggcatttaattccaaaacattaacttaataaatcattatgaaccatcataagtggaaggaataaaaaataataaatgaaatgatattcttctgtatttgtgatgggcatcacaatagatataaatgcaggtaccctgacatttctgaacttcgcggatgaaatttaaaaacaatgccgacagcaaagaacaaactggtaatagctgtcagacataatgctgcctgctgtaatgtatacagcaggctgggggatattaatgcgcggcgtcgtgctgcacggagtgcgtgggtgattcctgaactgactgagagtctacaactatgccatcctgagctgatttcagtaacagacctgcctgatagtattttccttcgttcatcaaggaaagcgctgtggtcacatccttacgggtttgctgaagaggaatgagttcctgattttcaataacactgacgcctgctagtttcagggcctctatagtcccttttttatctccttctttcattttctggtttgctttattaatagcatcatttttctggcccgcagggagataatcttctgctaccgtaatcgatgaatttatccgaatatagtggtctccttcaactggggcttttttatctgatttgacatacagattccagtcagtgctgtcatcgttcaggagtttttctgcttgcgcagccagttgttccgccttttgggtgcgaccattaaacaactcgaatcgcgacattccgatatcacgcatggcctgccaggcctgtccggatatcttgtcattattcagagtaacgttatcagtcatgtttgttgcggccataatatttcctgaaaacaggataaccatcagcgcaacgcctggcataatatggcttttcataatccatcatctccacaaagtaacattttttatcggattatcctattcagaaccggtaacccacgccaagattaaaaccattgctattaaggcttccgctgttatgggtagcatcaaaatccgctccctcataacccagagttatagcgacactactgaccggggtataagccacgccagcagaataaccatatccgaccttactgtcagactcatttatcccgtgatcacgctgatgcaataatacggggcccacttgactatacagacttaactggttatttattttccatgaggggcctgcaagcagggagtaataacgggttgttacacgaccattactgctttcatcggaatagcgctggcttccatttagccatgcaaatgaggttgtcagcccccagtccggtgacatttcatagttgtttgccagccgtaccccacgcaacgtcccggcgtgattagtatgggactgggcgtatccaagtgaaaatgtactggcattatcgtctgcccataccggactggctgcagcagacagcagaacaataccggtacttccggctaatagcattttgttcatcttcttctctccggttattttacctgataccttactggcatgtattaagttaaaatctttccgtgataacaaactataaataaatcttttaaattatgagcactgttacgccagcaaataactttatctccggctgtcgggaggctattcacgaaaatatatccaggccagaaacagtatttaataataaataaactggaaaataaaaactgacaaaaatagaagttcactgatatataccaaaaataatttgagttgctgaaaggcggcaagggagtgagtccccgggagcatagataacgctgtgaccggggagagcaacaaatctgccgggagcagacttgaacgtcgcatgcgacggcccgtcagggcgaggcccatggatggactgagtaatccgtagctaacacataagccacttgaagtatgaagggtatataacgggaaagaaggcctatcggcctggtaaatcaacgtctgtgatttaagttgcaggaaacggctatggagagggggatgcggcagttatcgggcagtaacggcattgttcagtgagtatccaggaaacaaaaaaagaagggagcggtactcccttcgtaaacatgtcagaatacgacattttggtactcttttatttattatctggccgtaaaagttatgctgttggcagatatctccagtcaacataaaaaaataccaccagctaaaaatgtgatgcaaaccaccattaagcaggtaaccaaattgactgtgccactaaatccggaaaagagtttgaatccggggataacatctgatgcagaaattagcaccagtcttcgattcggatacccggaatgcgttcaaattcgcggagattgtttgtgacgacgaccagtccgcggctaccggcatggccagcaatcatctggtcataaggcccgacaggtgttcccttgcgggccagttcggcacggatttgaccggtatgtatcgctgcctgtgtatcgtaatccaaaacctcaaggcgggagataaatccctccacgacggcaagattacgctccggcgccaggcttttttcagcaccgtaaatcagctccattaaggtgatggagctgatacacattcgggatgtattgaggttgaagcgttctctgatgtgttcgggcttatttttgatggtgaaaatacaggtattggtatcaagcatgaatttcagcatcaaaatccttcccgttcctgtactgcgggttgttctctggtactcataaaatcagtactggcgccttcgccatcgaaccagctgtcccaggattctccgactggagtaatgattctgcttctgccaaccgcaatgatttcgacatgtttcacatcctccggaaaggatatcgatttaggcaatctgactgcctgggtccggttactaaaaaaaagtgttgtgtgcataactgcctcctttctggatatacaacgcgtatatccattatgagtagaggcgatgtatatgtcaaagagatatacaggaaaaaataatccagtcacatgacgcgcactccgcagggcatccttgtccgactccggcatttctgaatacatccaatgaaggaaataccatgcaaacaatgcataaaaaacatatgtgcccatggcttctgcccggtttgctcggtctggctcggtgtgcgccagtaccgcatacttacgcagccatcattgaggcaggattttatccggaaggtacagatctccagcttgttcttaagataattgagaccgcgcgacaggaaatccgtctgatggactattccttcacctcttgggaggtggtccggttcgaacattcagtgagtacaaaattctccatgtcaaagtgatcgtcagcgacgaccgccacaccgaggtggacgcgtcagaatcgctgatcggacacgtcgcaatctacactctgacttataagccagcctgaaggggcatgttggctttgacgatcaggcaaaaaacaacggcgaataaagtcgtatgatgatcttcacatttatcatcatcagcgttcatattactcaacctgtaatcaacctctggcgtttttctgtatccatcacaaccatttccggtaaaggtaaaaaagggatttgaacctttccggagatgataatgaaggtaaatgcatggacaattttgcttatgtcggcgcatctgacggcctgtgccgtccctggcacagaaaaatatcagaccagcatggacagcgttacggcagaaaaaataagccggattatccagtcggatgtcattccttataaaggcgaaaaccatggagaagttatcagccgcgtatcgtctgcttttctcggaacaccttatcaggcggatacgctcatcggtgggcccggcatccccgaagtccttgtagcgaatttcaacggcgtggactgctttaccctggctgattacgttgaagccctggcccgcagcgataatcagaaatcgtttctgcataatcttgccaggactcgctacgccgcgggcaaagttgcttatctcagccgccggcacttcttctctgactggttcgccgcagcaccgcgtaatgcacgggatgtaacgccggatatcagccctgattatgtcgttgttgacaagcagcttaaccataaacctgatggcggcgagtacattcctggtctgggcatccatcctcgtaaaataaattacattcccggaagagccatcaaccagcaggtcatgaaccacctaaaaaacggggattatatcggtgtctactccccgcttgacgggctggacgtttcacatgtgggtatcgtagttcgccatgatgaacaggtgtggttcaggaacgcctcctcattggccgcaaacagaaaagtggtggacacaccgtttatggaatacatgcattccagaccgggcatcgttgtgctgcgggctgaatgataaagtcattaccggagtcgccagctgataatagccgtccgacataggtattgaaaccctgtgtactgtggggccgacacggaaaattgctgtaaattcgtggatttagtaaatactagaagatatttgtctggagcgggcgaagggaatcgaaccctcgtatagagcttgggaagctctcgttctaccattgaactacgcccgctttgagatgcgtaaagcattataaaccttacgctctggttggcaagagacttactggctgactggcgattaattcgccgtcagcacttcggtttactcccctgcggcggcagataacgcagcggatcgatggccgtcgcccggtagcgaatctggaagtgtagtcttacggatgcggcatccgtgctgcccatcgtagcgattttttgccccgctttaacgctttgtccattattaaccagcatggtgtcattatgagcgtaagccgtaatgtaatcttcattgtgcttaatcatgatgagattgccgtaaccgcgcagctggttcccgacatagacaactttacccgctcccgccgcataaacaggcgttccgcgcgcgcccgcaatatcgatccccttatttccgccctccgcggtggaataaggtaaaatcactttaccgttagcaggccatacccaacaacgctgccccaccggcggccaggaggattttggcaccgaagatgacggtctgaccgcagcagtttttgttgctgttttattgctggttttgcgtgttgaagtgctactctttgcgctgccgcgcactttaattcgctgccccacctcaatagtataaggcggagaaatgccattcagtcgggccagttctttcacgctggttcccgtagcgcgcgatatacgatacaacgtatcgccgcgcttaacggtatagacggagccggaatacgttcctgagccggaattactggaacaccccgccagcagcagccctgtgcataacagcaccgcaatacccaggctatttttgttcaggcgtcctgcgctcaaaaccattcctcactctattgacagacgccttatgatagcagccaaatgccgtatgcccaatccattgacgccggaaaggggccgcgtggatgatgatgccgcgaatatccgatatgccagcataatatcgactcacggcacaatggcgctcgtctgcgttctgtcagggcctgttttggtaatgcctttctttctgttatgcgctacgctgatcgtctgagtatatggcctggccatgctgccgggtcattttaattttcaggagctttcatgactgaggaacatgtcgttttattggatgagcaggataagccttccggcacactggaaaagtatgcggctcatacgcttaatacgcctttgcatctggctttctcctgctggctatttaacgaagatggtcagttgctggtaacacgacggtcgctgagcaagaaagcctggccaggcgtgtggacgaattcggtttgcggtcatccgcaacaaggcgaaaccaccgaagaggcgatcatccgccgttgtcggttcgaactcggcgtggaaattaccgatctcacccccgtctatccgcacttcagctatcgagcgacagatccaaacggtattgtggaaaatgaagtctgtccggtatttgccgcgcgggcaaccagtgtgttacaggttaacagcgaagaggtgatggactatcagtggagcgaatttaaaagcgtatggaaaagccttctcgctacgccgtgggcatttagcccgtggatggtcatgcaagcgtcagacgaacaagcgcgtgaacgactgctcaattactgccagcgttaaagattgcctgatggcgctacgcctgaacgaagagatgccggatggcggctgatgccccatccggcaatttacatcttatttcaccggacgcatcgccgggaacagaataacgtcgcgaatcgtgtggctgttagtaaacagcatcaccatacggtcgataccaattcccagacccgctgtcggcggtaaaccgtgttccagcgccgtcacgtagtcttcgtcgtagaacatggcttcgtcgtcgcccgccgcttttgcattaacctgatccaggaaacgctgcgcctggtcttccgcatcgttcaactcgctaaagccattgccgatttcacgaccgccgataaagaactcgaagcggtcagtgatttccgggttcacatcattacgacgcgccagtggagacacttcagccggatattcggtgatgaaggtcggctgaatcagatgcgcttcagcgacttcgtcaaagatctcggtgacgatacggcccagaccccagctcttctcgacgtgaatgccgatgctttcagcaatcgccttcgcggaatcgaagttgtccagatcagccatatctgtttccggacgatatttcttgatcgcttcacgcatggtcagtttttcgaacggcttaccgaagtcaaacacttcatcaccgtacggaacctgagtggtgcccagaacatcctgcgccagcgtacggaacagagactccgtcagctcgatcaggtctttgtagtccgcatacgccatatagagttccatcatggtgaactcaggattatggcgcacggagatgccttcgttacggaagttacggttaatttcgaatacgcgttcgaagccgccaaccaccagacgcttgaggtacagttccggcgcgatacgcaggtacatgtccagatccagcgcgttgtgatgggtgataaacggacgggcagacgcgccgcctgggatcacctgcatcatcggcgtttcgacttccataaagccgcgagcaaccataaactggcgaataccggccaggatcttcgaacgggttttgaaggtgttacgggattcatcgttagagatgagatccagataacgctggcgatagcgcgcttcctggtcctgcaggccgtggaatttatccggcaacggacgcagcgctttcgtcagcaggcgcagttcggtgcagtggatagacagctcgccggttttggttttgaacagcttacctttcgcgccgaggatatcgccaagatcccacttcttgaactgctcgttgtaaacgccttccggcagatcatcgcgcgccacatacagctgaatgcggccgcctacgtcttgcagggtaacaaaagaggctttacccataatacggcgagtcatcatacggcccgcgacggacacttcaatattcagcgcttccagttcttcagcttctttcgcgtcaaactctgcgtgcagttggtctgaggtacggtcacgacggaaatcgttcgggaacgggataccctgctcacgcagtgcagccagcttctcgcgacgtgccttcatttcattgttaagatcgactacctcgtcagcgccctgtgcgttttgttcagacatgttgattcctcatagccctgctttcaaacttgcttcgataaattgatccagactaccgtccagtaccgcctgtgtattgcgggtttccaccccagtacgcaggtctttaatgcgggaatcgtccaggacataggaacgaatctggcttccccagccgatatcggacttagtgtcttccatcgcctgtttttcagcgttctttttctgcatctccagttcataaagcttcgctttcatctgcttcatggcctggtctttgtttttgtgctgcgaacggtcgttctggcactgcgtcacgattccggttggaatatgggtgatacgcacggcggattccgtacggttaacgtgctgaccgcctgcgccagacgcgcgatagacgtcgatacgcagatccgccgggttaatgtcgatatcgatatcgtcgtccacttccgggtacacaaacgcggagctaaacgaggtatgacggcgaccgccggagtcaaacgggcttttacgcaccagacgatgtacgccggtttcagtgcgcagccagccataggcatattcgccggagattttgatagtcgcggacttaataccggcgacttccccttccgattcttcaatgacttctgtcttgaagccgcgcgcttccgcccaacgcagatacatacgcagcaacatgctggcccagtcctgcgcttcagtaccaccggaaccggcctgaatatcgagatagcaatcggcgctatcgtactcgccggagaacatccggcggaattccaactgcgccaacttctcttccagcgtattcagttccgcgacggcttcgttaaacgtctcttcgtcgtcagcttctaccgccagttccagcagcccggaaacgtcgtccagcccctgagtcatttgatcaagcgtatcgacgatcgcttcgagcgatgaacgctcttttcccagcgcctgcgcgcgctcaggttcgttccagacatccggctgttccagctcggcgtttacttcttccagacgctctttcttagcatcgtagtcaaagataccccctaagaacgttggtgcgttccgtgaggtcctgaatgcggttattcaccgggttaatttcaaacatggtctgatttcttttatttgacttgtcaaaatgcggttataagggcgaaatattagcggatttcgccccttaattacagcgaaagtgttgttaaatcgccccgatcatagcggccaaatatcatcgataataatctgtaaactacggttgccgcgaaactcgttaatgtccagtttataagccagttctacctcccgcacgccgttatccggccaacaggtcgtatcaatattaaatgcgatgccatccaacagcgggccgccgccgacaggctccaccatcaccttgaggtgacgctcgcccaccagacgctgctgtagcagacggaaacgaccatcgaataacggttccgggaacatttgcccccacggtccggcatcccgcaacagttgcgccacttccatagacatctccgccgcgcttaatggaccatcggagatcacctcgccttgcaacagggcaggatcgagccattccgtcaccagctcgccaaaccgttgctgaaactgctcgaatttatgctcttccagcgacaatcccgccgccatcgcatgaccgccgaacttgatcatcagatcagggtaaagggtatccagcctttccagcgcatcgcgcatatgcagcccctgaatcgaacggcctgagccttttagcgtgccgtcgcccgcaggcgcaaaggcgatcaccgggcggtgaaaacgctctttaatgcgcgacgccagaattccgaccacgccctgatgccattcaggatgatacatcgccagaccgcccggaagcgtttcactactgcgctcaagcttttcgcacaggataagcgcttccgcctgcatcccctgctctatttctttgcgcgtctggttaagcgcatccagctcgctggccagaacacgcgcttcgccgaggttatcgcacaacagtaacgccacgccaacggacatatcatccagcctgccggcggcattcaggcgaggccccaacgcgaagcctaaatcactggcggcaagctgctgcggatcgcgattcgatatctccagcaacgctttaattcccggacggcatttcccggcacgaatacgacttagcccttgccaggtcagaatacggttgttagcgtccagcggcacaacgtctgctaccgtacccaacgccactaaatccagcagctccgccagattcggcggcgcgatgttgcgctcgtcgaaccatcctttgtcgcgcaaaaatgttcgcaacgccagcatcaggtaaaacgccacgccgacgcccgccagcgacttagacgggaattcgcagtcgcgcagattgggattaataatcgcttcggcatccggcaacgtgtcgcctggcaggtggtgatcggtcacgatcaccggaatccccaacgtctttgcatgcgctacgccggcgtgggatgaaatgccgttgtctacggtgacgataagctgcgcgccgcgcgccttcgcctgatcgaccacttccgggcttaaaccgtagccgtcttcaaagcgattaggcaccagataactgatgttgtcacatcccaacgcacgcattcccaatacgcttagcgcagtactggtcgcgccgtcggcgtcaaaatcgccaacaacaataatgcgggtaccttcgcgaaaggcgttgtagaggatctccaccgcgttatctatgccgctaagctgttgccagggcagcattcctttcacgctgcgctccagttcgcgggcgctacgaacgccccggctggcatataaacgtcgtagtaatggaggaagatcggcggggagttccgccgtctcatcagcctcgcgccgacgaagttgtctctgttgtttcacgcgtattatttaccactggtctgtttttgatgctcatcaagaaacgctttcatctctttcggtccctgatagccaggcaccacatagccgttactcaatacaatggctggcgtaccgctaacgcccaactgcacgcccaacgcataatgatcagcaatgttcacgtcacagcttgccggtttcacgcccttacctgccatggcgtcatcaaacgctttgtttttgtctttggcgcaccagatagatttcatatcctgctccgcctggctttccagcccctggcgcggaaaagccagataacgtaccgtgatccccagcgcgttataatctttcatctcttcatgtagcttatgacaatagccgcaggtgatatcggtaaaaacagtaatgacatgtttctcatccggcgctttatagacgatcatctctttttccagcgcatttagctggctcatcagcagtttgttcgtcacgtttaccggatgcgcgccgctcacgtcatacatcggcccttgaataatatgtttgccgtcatcagtgacgtacagtacgccgctgtgagtgaggacggttttcatccctgccactggcgaggcctgaatttccgtactctgaacgcccagcttagccagcgactgacggatagccgcatcatccgcatgggccacgcctgaaaacaccgccgccagtaaagtgaacatcataaaacgctttttcataaactatcctttcctgtcagcactcatgcccgcggatggtgctgttgatgaagttgacgcaaacgctccgttgcgacatgcgtataaatttgtgtcgtcgaaagatcgctatgcccaagtagcatttgtacaacgcgcaagtcggcgccgtgattcagcaaatgcgtggcgaaagcgtgacgtaaaacatgcggcgatagtttttcgctatcgattccagccagtaccgcataatgtttaatacggtgccagaaggtctgccgcgtcatctgctgcgcacgctggctggggaataatacgtcaatcgatacgccattgagtaaccatggacgcccatgctccagatacgtttccagccaatataccgcctcttcacctaacggcaccaaccgctctttattgcctttaccgataacccgcaccacgccctgccgcagactgatatcgctcattgtcagccccaccagttccgacacgcgcaaaccggtggcatacagcacttccaacatagctttatcgcgcagctccaaaggttgatcaataagcggcgcctgcaagagccgttcaacctgcgcctcgctaagatctttcggtaaacgctgcggaagcttaggcgaggccaactgcgcgctcggatcatcctcacgatacttttcacggtacagatgctggaaaaagcgccgcatagcgcttaacaggcgtgcggagctggtcgctttgtatccgccctccacacgttcagccaatagcgtttgtaaatcatcagcctgcgccgtcgcaagcgtttttccgcgatgatgcaaccacgcaacgaccatcgataaatcgcgacgatacgcgcttaatgtattttccgccagatttcgttccagccacagggcatccagaaactgctcaatacgcgctaaatcctgttccattcgcgctccctacttcacgcttacttttggtgcattatgcctcattgtgccgtgaatgcagcgattctgttacactacccgcaacgctatagcagaatcgagatgtaacgtaatgaacatgggtcttttttacggttccagcacgtgctacaccgagatggccgcagagaaaattcgcgatatcctcggcccggagctggtgacattacataacctcaaggatgacgcccccgccttaatggagcagtacgacgtgctcattttaggcatccccacctgggattttggtgaaattcaggaggactgggaagccgtctgggagcaactggacgatctcaatctggaaggcaaaatcgttgcgctttacggtatgggcgaccagctcggctacggtgagtggttcctggatgcgctgggtatgttgcatgacaaacttgccctcaaaggcgttaaatttgtcggctactggcccacagaaggctacgaatttaccagcaataaaccggtcattgcggatgggcaactgtttgtcggcctggcgctggatgaaacgaaccagtacgatctcagcgatgagcgtatacagacctggtgtgaacaaattctcggcgaaatggccgaacactacgcctgaaaccttactcgctgtacttccctctcgacggaaccgcgtttacgccgttccgttagtgttggcctgatatcggctgctgtaacagtatccgacgcaactcacgccattccgcttcttccatgctatccgccgccagccataaatgctgatgacgtccagactctgcgcgtaaacgcaacaccatcccgctcttcagtaaccagggcggacgcaagagcgtccagtcctgcccctgccagcgtaagcgcccgtccatgagtagcttgatctctccctggcaggtattaatcctgcgctggctacgtacacagtcaaacacgaccagcgacagtagtatcatccataacggggtataactcagcggccagggcatcaataaaatcaccgcggcaaccagcccatgaatgagcaatgagatccactgagcgcgccatgagacgcgtaaatcagattgccacaggaccacgttcccgattccgtgtctgaatgagtcggaccatctgttccagttcagcgtcagccggtttaccgtgattcattaaccagttaaataaatccgggtcatcactctgcaacaaacggacaaaaatacgcttttcttcatcacttaaactatcgtactcatgttcaaaaaacggcatgatggaaatatcaagttcgcgcataccgcgacgacatgcccagtgaatacgtgctttattgtgaatatccatgttcttcctgcctcgcgaaaatgaagtaccgggctattgtaacgtgtttttggcgttgttttacgggaatctcagtaatctggaacgcgatcgcgaaataaaaggctgggaatcaatatgttcatccattttggataccgcctcgcaaaacgatcaatccgctctcaatgggctatttaaagcacttgcaatgaccgatggctcttttaccattaaccattattgttgcagctaaccaggacattatttatggcttttatctcctttccaccacgtcatccttcatcgtcagcccgcctgccgctgacgctgatcgcgcttgacgactgggcgctgtcgaccattaccggcgtagacagtgaaaagtatattcagggccaggtcaccgctgacgtaagccagatgactgaacagcaacaccttctcgccgcccactgcgatgctaaaggtaagatgtggagcactctgcgcctgttccgtgagcgcgacggtttcgcctggattgaacgccgtagcgtgcttgaagcgcaattaacggagctgaaaaagtacgccgtattttccaaagtggtcatcgcgccggatgacgaacgcgtattgcttggcgtggccggttttcaggcccgcgcggcgctggctaatgtctttagcgaactgcccaatagcgaaaatcaggtggtcagagacggcgcctccacgctgctatggtttgaacatcctgcggaacgattcctgcttgtcaccgatgtcgcgacggccaacatgttaacggagaagttgcatggcgaagccgaactgaataacagccaacagtggctggcgttggatattgaagcaggcattccggtgattgacgcggcgaacagcggtcagtttatcccccaggcgactaacctacaggcgctgggcggcatcagcttcaagaaaggctgctacaccggacaggagatggtcgcacgggcaaaattccgcggcgccaataaacgcgcgctttggttgctggcgggcaaagccagccgggtaccggaagcaggagaagatctggagctacagatgggcgagaactggcgtcgtaccggcgctattctggcggcgacgcagttggacgatggtcagttactggttcaggccgtcatgaataacgatttagaagccgaaagcgtcttccgcgttcgcgacgatgccaacaccctgcatatcgtcccgctgccctactcgctggaagagtgatatcacgttaaaagccggatagcctgatagcgcaacgccatcaggctcgcacgtgctgttctcgtaggccggataaggtgcgacagcgccgccatccggcacgggcatccgggaattatgcctgtcccacatacaaatagatggccaggaagtggcacacgctgccacccagcacaaagccatgccagatggcgtggttataaggtatgcgtttgcaaacatagaaaattacgcccagcgagtaaacgacgccacctaccgccagcagcgtcacgccgcctatcgccagcttaatcgccaactgataaaccactatcagcgacagccagcccattgccagatacgtaaccagcgaaagcactttaaatcggtgcgcaatcgtcaacttgaagaggataccgaatagcgccaggctccagatcacaatcattagtccgcgcgccagcggcgaatccagacctaccagcagaaatggcgtataggttccggcaatgagcagatagatagcgcagtgatcaaatttctttaaccagatttttgcccgctgatgaggaatggcatgataaagcgttgaggcaagaaaaagcaggatcatgctcccgccatataaactgtagctggcgatagccgtcatacccgcattcgcctctaccgcctgaaccaacaacagcaccaggccgacaataccaaataccaatccaatgccgtggctaatactgttggcgatttcctcagccagcgaatatccctgcgtcattaatggtttttgcaccataacttactccggagaaacgttcataacgatgaactgcgcctctagcgtaactgagaatggttccagtgaacacatgttagctaaaataaattcgcaaaattaaattttgtttattattcaataagttaattacaaaaactcaactaacacgcgttcatatttatcaaaggcatttaaaatcaatcacataaaattgcgtctggttgggatagatttcagcaatgacccgtttcagctcatcaagcgacatattttcctgttgcgcatgtttttcgttcagcgtatccagcgtcacagttgacgttcctgtcacttcgattgtgcaaaaatagccatcatcttcgaaccgccccacgcgtagcacatcgcctgctttaaagtgggactcggaggcatcacgaatagtgatggttttacgccctgccagaatgtcattctggaaacgttgaaagaaagtaatgtcgtttggctgcatgtggttatccccctgaatatggccccttgaagtggatgttacgatctgaatgtgttcttgctccgacacgcgagcatcctggaattttgcgtacgctttacatgccacttggtgcagaatgaatgataacagactaaataaattgagattatgcaacaatgagaaaactcaccttgccaaaagattttttatggggcggcgcggttgctgcacaccaggttgaaggcggctggaataaagacggtaaaggccccagcatctgcgacgtgctaaccggcggcgcacacggcgtgccacgcgaaatcacccagaatgtcgttgctggcaaatactatccgaaccacgaggcggtggatttttacggacattacaaagaagacatccgtcttttcgccgaaatggggttcaaatgcttccgtacctctattgcctggacgcgtatcttcccgaatggcgacgaatcccagccaaacgaggccggtctgaaattctacgacgacatgtttgatgagttactcaaatacaacatcgaaccggtcattaccctttctcactttgaaatgccattacatctggtacagcactacggcggctggaccaatcgtaaagtggttgatttctttgtccgttttgctgaagtcgtgtttgaacgctacaaacataaggtcaaatactggatgaccttcaacgaaattaacaaccagcgaaactggcgcgcgccgctgtttggctactgctgttccggcgtggtgtataccgagcatgagaatccagaagaaaccatgtatcaggtcttacatcatcagtttgtcgccagcgcgctggcggtaaaagcggcacgtcgcattaacccacagatgaaagttggctgtatgctggcgatggtcgcgctgtatcctttctcctgtaaaccagaagatgtgatgtttgctcaggagtcgatgcgtgaacgctacgtctttaccgatgtgcagctgcgcggctattacccgtcctatgtgttgaacgagtgggagcgccgcggatttaacatcaaaatggaagatggcgatcttgaagtgctgcgcgaaggcacctgcgattatcttggtttcagttattacatgaccaacgcggtcaaagccgaaggcggtagcggcgatgcgatttccggttttgaaggcagcgtaccgaacccctatgttaaagcatctgactggggctggcagattgacccggtgggcctgcgttattcattgtgtgaactgtacgaacgctatcaaaagccgctgtttattgtcgaaaacggttttggtgcttacgacaaagtagaagaagatggcagcatcaacgacgactaccgaattgactacctgcgcgcccatattgaagagatgaaaaaagcggtgacttacgatggtgtcgacctgatgggctacacgccgtggggctgcatcgactgcgtgtcgttcaccaccggtcagtacagcaagcgctacggcttcatctacgtgaacaagcacgatgacggtacgggcgatatgtcgcgttcgcgtaagaagagcttcaactggtacaaagaggtgattgccagcaacggcgagaagctttaactcctgcacgttacccgccagtcggcgggtaacactttgaacgagtcttaccaggtcttacctattttaaattcccagcgtacatcttccattttggttggcgacttcgcttcctgcattaccgggaagaaggctccggcaccaaaccataatttcagtgaatcgacggcaatattaaatgacggaccaacaacccattcggtagttccagaatggttattaattacgctgccattagacagttttttcgttccagaggcattattgctgtaggcactttccagaccaagatccagcggtaaatcgctaaacatataccgcacctgggtattccactggaattcgttacctcgtttcacgtcctggttaccgcgctcaaatggtccctgatatacaaaacccatatcccctttaatgttaggagtaaataattttgttaaagtgagtgttactcttcctccccaggcgctattcccaggcaaatgattatctccatcttgcccggtgggtagtaatactgccccacctaccgtaacccaaaacggatcacctcttcgctggctcattaaagcataattgacccccaccgattggtcgcccattccctctatgtgctcaggagacagattgtctcgtttgttattgatataggaacccacagttgataattccagtctgtcggtcaaaccgtaacgaatcttcaataaccatatctgggagtaaacatccggacttccatgcccctcgatttgatgatctttatcgcgaaatgagctattcatggcggttaataactttccttccggcaatactgaaccaccagaaatagcggtattaactggtgcacctaatagattactgggattattttctccgttagctgccattgcattcattaatagaaaatatgtcattaatggcagaaatataaatcgtttcattattccctccaggtataaaaaacaaagtgctaagttaataaatatttacgttatttatgcttatctttaatttataatttaaattaataacttgatgaatttaatatacggaaatttttgtaactatattgagaggtaaataacgattccggagagaaactatttgtaaccacatgtaaatataccgtgttatttttattaaataacagcaaggtaaaaatgatgcacaatgaatcattagactctaaaaaaccggtaatttaattctggctaatacactgatacaaacgccaggttgcctgacaggagccaacgatttactgtaatatattgaattagtaacactttgtagcctgaataaggcgctcacactgcatccgacacaaacaaagcgcattttattaacaagctgaaaaggcgccgaagcgcctttagaagacagtcgaatcagtaaattactggtagtcgctaatcggtacgcaggagcagaacaggttgcggtcaccataaacatcatccagacgtttcaccgtcggccagtatttgtctgccacgcctgccgggaatacggcaacttcacggctgtacggatgcgcccactcggcgaccagttcgctctgaatgtgcggcgcgttcaccagcgggttatcttccagcggccagacacccgctttcacctggtcaatctctgcgcgaatagccagcatcgcatcgataaagcgatccagctcggccttaccttcagattccgtcggctctaccatcagcgtgcccgccaccgggaacgacatggttggcgcatggaaaccatagtcgatcagacgcttggcaatatccagctcgctgatgccggtttcttctttcaatgggcgaatatcaagaatacattcgtgcgccacacggccatcgcgaccggtatacagtaccggataggcatctttcagacggctggcaatgtagttagcgttaagaatcgcgacctgacttgcctgcttcaggccttctgcgcccatcatgcggatgtacatccagctgattggcagaatggaggcgctgccgaacggcgccgcagacaccgcgccctgacgggtgagcatcccttcaatttgcaccacgctatgacccggtacgaacggtgccagatgcgctttcacgccgatcggtcccatgcctgggccaccgccgccgtgcggaatgcagaaagttttatgcaggttaagatgcgaaacgtccgcgccaataaagcccggtgaggtaatgccgacctgagcgttcatgttcgcgccgtcaaggtaaacctgaccgccgaactggtgcacaacttcacacacctcacggatcgtttcttcatacacgccgtgggtggacggataggtcaccatgatgcaagaaaggttcgcagcatgttgttctgcttttgcccgcagatcgtccaggtcgatgttgccgttcttatcacaggcgactaccaccacctgcattcctgccatatgtgcagaagcagggttagtgccgtgagcagaggccggaatcaggcagatatcgcgatgaccttcgttgcggctttcgtgatagtgacgaatcgccagcagccccgcgtattccccctgtgcgccggagttaggctgcatacagacggcgtcgtacccggtgagtttcaccagccagtcagaaagctggctaatcatctgatgatatccttcggcctgttccggcgggcagaacggatgcagttcagcgaattccggccaggtgataggaatcatctcggcggcggcgttcagcttcatggtgcaggaacccagcgggatcatcgcctggttcagcgccagatctttacgctccagcgagtgcatatagcgcatcatctcggtttcgctgtggtaacggttaaataccggatgcgtcagaatcgcatcgtcacgcagcatactttgctgaatggaacggctatcaagcgccacgtctttatccagtgtttcaatgttcagaccgtggctgtcgcccagcaaaacattgaacaactgcgccacattctcacgggtggtggtttcatcgagcgtaatacccaccgcgttatgaatatcgctgcgcagattgatctctgccgcttccgcacgcgccagtaccgcagctttatcagccacttccacacacagggtgtcgaagtagtgcgcatgacgcagctttaagcctttctgttgcagacctgccgccagaatatcggtcaggcggtggatacgattcgcaatgcgcttcagaccgaccggaccatgataaacggcatacagactggcgatgttagccagcagtacctgcgaggtacaaatgttggagttcgctttctcacggcggatatgctgctcgcgagtctgcatcgccatgcgcagtgcggtattgcccgccgcatcttttgagacgccgataatacggcctggcatggagcgtttaaattcgtctttggcggcaaagaacgccgcatgcgggccaccgtaccccatcggtacgccgaagcgttgcgcagagccgaaaacaatgtccgcgccctgtttgcccggagccgtcagcagcaccagcgccataaaatcggcggcgacgctgaccacaactttacgggatttcagctcagtaatcagtgcgctgtagtcgtgaatttcgcccgtggtgcctacctgttgtaacagcacgccaaacacatcctggtgatccagtgctttcgccgcgtcatccacaatgacgtcaaagccaaaggtttcggcgcgagtacgcacgacgtccagagtttgcggatggacatcagaggcgacaaagaaccggttggcatttttcagtttgctgacgcgctttgccatcgccatcgcttcagcggcggcggtcgcttcatccagcagcgaggcggaagccatgtccagccctgtcaggtccagcgtcacctgttggaagttgagcagcgcttccagacgcccctgagagacttccggctgataaggagtgtaggcggtgtaccagcctggattttccagcatgttgcgcaggataaccggcggtagctgcacggcggtgtagcccatgccaatgtacgacgtgaagcgcttgttacgcccggcgatggcttttaattccgccagtgcggcatattcggttgccgcctctccaacctgcggcggagtcgcgagctgaatgtctttcggcacaatctgacctgtcagcgcgtttaacgactcggcgccaaccgcattcagcatctcttgttgctgtgcggcgtccggtccgatgtggcgttcaatgaaagcgccgcggttttcaagctggcttaacgtctgtgtcatgggcgatggttcctgaaacgtgcagtgaatcgtgattgtctctaactcaattgcccggtggcgctgacgcttaccgggcctacgcgtgcgaaaacgaatacgcaaaatcattcgcgttgcagtgagtaggccggataagcattagcgccatccggcacaacattattcgtcttctaacaatgcctcatacgcggtggcatccagcagcgattcaagttcgctttcatcgctggctttgattttaaagatccagccaccggtatacggttcgctgttcaccagctccggggagtcgctcagcgcatcgtttaccgccacgatctcgccgcttaccggcgcataaatgtcggacgccgcttttacggactccgccacggcgcagtcgtcgcccgcgcttacggtcgcgccgacttccggcagatcaacaaaaaccatatcgcccaacagctcctgagcgtgttcagtaatgccaacggtgtaagtgccatccgcttctttacgcagccattcgtgttctttgctgtatttcagttctgcgggtacgttgctcatcaattaatctccaaaaaaggatgaatcacgcgacggctttgccgttacgcacaaaaacaggtttagtcacttttaccggcatttcacggttacgaatttgtacaatcgccgtctcgccgatgcccgccggaacgcgcgccagcgcaatgctgtagcccaacgttggggaaaacgtcccgctggtgataatgccttcttgctgattgccctgcgcatcggtaaaacgcaccggcaattcattacgcaatacgcccttctcggtcatcaccagaccgacaagctgctcatggcctttttcacgctgcatctccagcgcctcacggccaataaagtcgcggtcagcaggttcccaggcgatagtccatcccatattagccgccagcggagagataccttcatccatctcctgaccgtacaggttcatgcctgcttccagacgcagcgtgtcgcgcgcgccaagaccgcacggcttcacgcccgcctccaccagcgcacgccagaaatccgccgctttttcattcggcatggcgatttcatagcctgcttcgccggtataaccggtggtggcgataaacaaatcgcccgcctgaacgccgaagaacggcttcataccttctactgcatggcgctgttggtcagtaaacagagtcgccgctttttcctgcgcattcggcccctgtaccgcaatcagcgacaggtcgtcacgaacggtgatgtcgatggcataaggttcagcgtgttgggtaatccaggagaggtctttttcgcgggtggcggagttaacaacgagacggaagaaatcttcagtgaagtagtagacgataaggtcatcaatcacgccgcccgatgcgttaagcataccggagtagagggctttacccgtcttcgttagcttcgcgacgtcgtttgccagcagataacgtagaaactctcgtgtgcggctgccatgaagatcgacaatggtcatatgcgatacatcaaacatcccggcatcggtgcgcacagcgtggtgttcatcaagctgagagccgtaatgcaggggcatcatccagccatgaaaatcgaccatgcgggcgccgcatagcgtgtgttgttcgtacaaaggcgtctgttgggccatcttttcctcgttgaattagcgggggctaacaaccattttcatgggaaatcttcgccacgaaacctggcatcgacgccctttttcctgcgccgacgcaaacgttctcttgctcctgaacttaccaccgaaccaggcgctaaaccataaggctgaatttaccatcacattagcttatgactaaaaaacgccaaaaccccatcagcacaaaaaaccactattacgctaaataacctccataaaaatgaagctgatacgatttatcacaacataaattaatattaaatgtggaaaaaatgtcgaaaatctcgttcgcaaaaaatagtggcattagaaaatataatgcgaaataagcggtgaaattagattatttcaaacgaggaaagccccccggcgcgatagccgggaaagcaaagtgtgacgggtttcaaactcttgctggcgtgcagtcagacgcttaacgaagccattgcggaaggtcgtttagccccattgcctggcgaagcagttggggtttgacgccggggagcgtgtccgccagtttcagtccgatgtcgcgcagcaatttttttgccgggttttcgccggcaaacaggtcacgaaaaccttgcatcccggcaagcatcatcgccgcactatgtttacggctacgctcataacgacggagataaagatgttggccaatgtctttgccctggcgctgaagccggcgcagatcgtccaccagttcggccgcgtccataaagccgaggttgacgccttgccctgccagcggatggatggtgtgcgcggcatcaccgaccaacgccagacgatgcgcggcaaactggcgagcatagcggcccgtcagcggaaaaacctgccgttcgctttccaggcggcataagcccagccgattatcgaaggcgatagtcaacgcctggttaaacgcctcgtcgccgctctgttgcatacgctccgcatcctgcggagaaagcgaccagacaatggaacacagatgcggatcgcttaacggcaaaaacgccagaataccttcaccatgaaacacctggcgagcaaccgcgccgtgcggctcttcggtgcggatagtcgctaccagcgcatggtgacggtagtcccagaaagttaagggaatatccgctttgttacgcagccaggagttggcgccatccgcggcaatcaccagacgcgcggttaacatcgcgccgtcttttaaagtcaggaaggcgtcgttctctccccaggcaacctgctgtaactccgctggcgccattaaggtgatatccgccgcttgctgcgctttttgccacaatgcgtagtgaatgacgctgttttcaacaatatgccccagatggctatatcccatgcttgcgtcatcaaacgtaatacggccaaagctgtctttatcccagacttccataccgtggtagcaacttgcccgtcgcgccacaatgtttgaccatacgccaagacgggtaagcagtttttcgctggcggcattaatcgccgacacccgaagctgaggcggcgcatcgttcgccaacggctgggggacaacgtgatccagtaccgcaacgcgcaaaccgctcccctgcaagccgcaggcgacagccagtcccaccatgcctccgccaactattgctacatcaacactttgcactatttactcctggaaaccggaacaatcaaaaccgtaggccggataaggcgaagccgccatccggtatttttacgaacacgatgccggatggcggcgtgaacgccttatccggcctacagatcggcttaacgcgcaacccaacctaaggtccgctgtgccagcgcatcgcgcgcaggtggtaataattccatcgccattaaaccgatattgcgcccaataaccagcggcgcccaacgatttgcaaacagatggaccagaccgttcgttacgccaatcgtcgtatcccggtcaacctgacgacgctgctgatagcgcgataacacgtgccaggcgccaatatcctcgcccgcgtcctgtgccgcgaccagcgtttccgccaggctcatgacatcgcgcagaccgagattaaacccttgtccggcgataggatgcaacgtctgcgccgcattgccgaccacgacagtccggtgagaaaacactttcgccgccgtagtcagggcaagcggatacgcgctgcgcttaccggcctgagtaattcgccccagccgccagccgaacgcggcctgcaatgcatggcagaactgcgcgtcggaccagctcagcacctcatcgcgctggtcgagcgggtgacaccaaaccagcgaacatcggccatgcgacatcggcaacatcgccagcgggccattgggggtaaaacgttcaaaggcgcgtccctggtgcgggatagcggttgcgacattcgctatcaccgctaactgttcgtaaggctcctgatgccagtcaacgccgcaggctgacgcgagcgcggagtgggtaccgttagccgccaccagcacgctgccagctatcacattgccgttttccagagtgacgttaacctgctgttgggtacgcgacacgctggctacgcgctccgggcagtgcagcgtaacgcctggcgctttacgcaagagcgcaaacagacgcagcccgatatcatgcagctccgcaacgtgccccaacgctgccagactgtagtcctgcgcgtcgagagtcacaaatccggcatggccgcgatcgctgacgtgtacggtgttgattgccgttgcgcaatcggaaatcgcctgccagacgccaattcgcgccagttgctgacaagtgcccgccgccagcgcaatcgctctggcgtcaaagccgggatgaccgtcggcttcaggcgctttcgcttcaatcaggtgtaccggcaacgtcccatgactgaactgagagatggccagcgccagcgtcgcgcctgccatgccgccgccaacgataatgacgctcattgctgccgcgccgccgccattaatgcctcaatgtcatccgccttcttcacaacgccagcggtcaggttttcattaccggtttcggtaatgacaatgtcatcttcaattcgaacgccaatgccgcgatacgcttccggcacgtcggcatccggcgcgatatagaggcctggctctacggtcagcaccatgcccggctccaggatgcgggagcgatccggcccataaacgccgacatcatgaacatccagccccagccagtggctcaagccatgcataaagaaaggacgatgcgcattttcggcaatcagttgatcaacctctccttgcaaaatccccagcttcaccagcccggttatcatgatgcgcacgacttcgccggtcacctcctgaatagaggtaccaggacggaacagtcgcaggctggtctccagcgattccagaacgatgtcataaatttcacgctgggctagcgtaaatttcccgttcaccgggaaagtacgcgtgatatcgcccgcgtaacctttatattcacaacctgcgtcgataagcactaaatcgccgtcgcgcatttcactttcgttttcagtgtaatgcaggatacagccattttcgccgctgccgacaatggtgttataggagggatagcgcgcgccgtggcgattaaattcgtggtgaatttctccttccagctgatactcaaacatccccggacggcatttttccatcgcgcggatatgcgccagcgcgctaatttccccggcgcggcgcaggacagcaatctcttccggcgatttgaacaggcgcatctcatggacgatcggtcgccagtcagtcatggtggccggcgcggtcagattctggcgggagcctttacgcagcttctccagcgcagccagaacaatctcgtcggcatacgcatattcgccctgcgcgtggtacaccacatccagaccattaagcaactgaaagagttgctggttgatttcgctaaacgccagcgcccggtcaacgcccagtttttccggcgcggcatcctgtcctaaacggcgaccaaaccagatttccgccgtcaggtcgcgaacgcggttgaacaaaacgctgtggttgtgggtgtcatcactcttaatcagtaccagcacggcttccggttcgttaaaaccggtgaaataccagaagtcgctactctggcgatacggatattcactgtctgcgctgcgcgtcgcctccggcgcggcaaagatcagcgcggcgctgccgggctgcatttgcgccagtaatgcctggcgacggcgttggtattcctgctgagtcatgacatggcctccatttcgttttttcttagtgtagcgtcggtttacgcacttccggcgcggtcggctgttggcgcgtgaaagtgtcatgacataacagcgccgcaacacggacatattcgatgatctcttcgagcgacatctccagctcttcctgatcttcgctctcatcataaccaagctgcgcaatattacgcaggtcgtcaatcgcttcacccgtttcgccggtgactttatcaagtttaggctgcgttacgccgaggccaagcaaaaagtggttaacccacccggctaaggcatctgcgcgatcgaatacgctgacatcgtcgccttcaggcagataaagctgaaaaagaaagccgtcgtcttccagcgcgtcgctggtcgccgcgtgcattttgcgcagcgcctgagcaagctcatgcccgaaggccagaccttcgttcgtcaggtcgtgcaacagcggctgccatgagctgtcgttgttgccgccgcaaatcatcccgctgattaaaccatgcatttcagccggggtcagaccggccccttgttgattcaaaaaccggttcatttcgttgtaaccaggcatttcgttctgtatagacataagcattcgtcatcaaagggaggatattcatgatatgctaccactttggaccctggtgaaccagaaaagggcttgtatcttcacaccagggtagctatagtgtcgccccttcgcggaccctgggtctggagacgaaggcagcgcagtcaatcagcaggaaggtggcatgtctgcacaacccgtcgatatccaaatatttggccgttcactgcgagtgaattgcccgcctgaccaaagggatgcgttgaatcaggctgcggacgatctgaatcagcggttgcaagatctgaaagttcgcactagagtcacaaatactgagcagttggttttcattgccgcattgaatatcagctatgagttaactcaggaaaaagcgaagacccgcgattacgcggcgagcatggaacaacgtattcggatgctacaacagaccatcgaacaggcgttgcttgatcaaggtcgcataaccgaaaaaacgggccaaaactttgaataacacttttcgctttactatggtaaagtgattgtgaaaacagaatttctctgagatgtttgcaagcgggccagtcccctgagccgatatttcataccacaagaatgtggcgctccgcggttggtgagcatgctcggttcgtccgagaagccttaaaactgtgacgacacattcaccttgaaccaagggttcaagggttacagcctgcggcggcatctcggagattccccttctgactggcgacagccatgacgcaacttcccgaactctctttatcacgacaagaaatccgccggatgattcggcaacgtcgccgtgcgctaacgccagagcagcaacgccgttttggtcaacaggccgccgcccgaatgctcagctttcctcccgtcgtgatggcgcacactgtcgccgtgtttctctcctttgatggcgaactcgacacccagccgctgattgaacagctatggcgagcgggcaagcgcgtctaccttccggttcttcatcccttcagccctggcaacctcctgttcctgcactattatccgcagagtgtgctggtgaccaaccgcttaaagattcaggagccacggcttgatgtccgcgacgtattgccgctggcaaagctggatgtgctggtaacgccgttagtcgcgtttgacgaagacgggcagcgcctggggatgggcggcggattttatgaccgtacgttgcaaaactggcagcagcataagatcctacctgtgggctacgcgcatgattgccagttagtggaaaagttgccggttaaagagtgggatatcccgctgcctgcggtggtgacgccgtccaaaatttgggagtggtagccgtgttttgtcgattgacagcgtcgcttttttgacctaaatttctcggtgaagggtgagggaggcgaacctccctcctgcgtactcactgttaatatgctgggcaagcgatgattaacaggatcagcagcatgatgacgtatctcatcatcgtccctttcctttttagagcccctgcctcggtaggggctttcccgtttcagcgctatgctgagcccttatcgtaaattccttttattgctgtacaacacgcaacgctgcctttaattaccaattgcggcaaggctcgaaaacagaatgtatgcgttacacgaagagatgttgaggcagggaaaccagagaaaggatgggcaggtcatctcctgcccatttagcggaaattagtacagcagacgggcgcgaatggtgcccggaatcgccttcatcgccagcagcgctttctccgccacatcgccatcggcttctatatcaattaccacataccccattcgggcggaggtttgcagatactgtgcggcaatgttaacgccctgctcggcaaagatctggttaagcgcggtcaatacgcccgggcggttttcgtggatgtgcatcaggcgacgaccaccgtgcagcggcagcgacacttccgggaagttcacggcggacagcgtcgagccgttatccgagtacttaatcagttttcctgcgacttccagaccgatgttttcttgcgcctcctgcgtcgagccgccgatatgcggcgtcaggatcacgttatcgaattcgcacagcggagaggtaaacggatcgctattagtggccggttccgtcgggaagacgtcgatagccgcccccgccagatgtttcgtcgccagcgcgtcgcacaaagccgggatatctaccaccgtaccgcgcgcggcgttaatcagcagcgaacccggcttcatcagggcaatctcttttgcgcccatcatgtttttggtggaggcgttttcaggtacgtgcagactgaccacatcgctcatattcagcaattcagacagatgctgcacctgagttgcattaccgagcggcagtttattttcaatatcatagaaatagacatgcatccccagcgattccgccagaatgcccaactgcgttccgatatggccgtaaccgataatgccaagctttttaccgcgcgcttcgaacgatcccgccgccagtttattccatacgccgcggtgcgctttggcgttcgcttccggcacgccgcgcagcagcagcaatagctcgccaatcaccagctccgccacggaacgggtattcgagaatggcgcgttaaagaccggaataccgcgttttgccgccgcatttaaatccacctggttggtgccgatgcaaaaacagccaatcgccaccagcttctctgcggcgttaatcacttcttctgtcagatgagtacgggatcgcagaccgatgaagtgggcatcgcggatggacgctttcaactgttcagcgtccagcgcgcccttgtgatattcaatgttggtgtaacctgccgcacgaaggctttccagcgccttttgatgcaccccttcaaccagcagaaatttaattttatctttctccagcgatacctttgccatttccccgatcctgtcttttttgccatctgatgttgtgtgtggatttgcatccgtccttcaacatatcaaaaaaaattatcacggcaatatgaacgtttgcgccagcgtcgtgaaggaatcgcatacagcgggaaatagcagatgaaaataccgggaataactttttctttggagggatcggcagggcaaacgattaaacgtgatacatgtcaccaaatttgccctgaccgaattttttacgcggcaggaaatacgcctggcgggatcattttacgatggttttcaccccgtccggcgtgccgatcagtgcgacatcggcgccacggttggcgaacaaccctacggtcacgacgcccggaatcgcgttaatggcgttttccagcgcgatgggatcaaggatttccataccataaacatccagaatcacgttgccgttatccgtgaccacgttctgacggtactccggacgcccgcccagcttcaccagttgacgagcgaccgcgctgcgcgccatcggaatcacttcgaccggcaacgggaatttgccaagaatatccacctgtttagaggcatccgcaatacagataaatttctctgccacggaagcaataattttctcacgggttaatgccgcgccgccgcctttgatcatctgcatatgaccgttgatttcgtccgcgccgtcgacatagatgcccaggctatccacttcgttgagatcaaacacatgaataccgaggcctttgagtttttcagtcgaggcgtccgagctggagaccgcgccttcaatctggcctttcattgtgcccagcgcatcaataaagtgtgcggccgttgagcctgtaccaacgcccacaatggtgccgggctgtacatactgaagtgccgcccatcctaccgcttttttcagttcatcctgcgtcatagatcgtttcgcctgtggtgtgaaaatacagccgcattatagaacattgtcgggaaaaatctccgtgtccgtacacaggctacggatttcatctgtaccgacggcaaatttatgtcatagtgcggaaaaaaataacaggagcatgacacaacaatgaaacgtccggactacagaacactacaggcgctggatgccgttatacgtgaacgaggattcgagcgcgccgcccagaagctgtgcatcacgcaatccgccgtctcacagcgcataaaacagcttgagaatatgttcggacaacctttgttggtgcgtaccgttcctcctcgccccacggagcaagggcaaaaattactggctctgctgcgtcaggttgaactgctggaagaagagtggctgggcgatgaacaaaccggctctacgccgctgctgctgtcgctggcggttaacgccgacagtctggcgacctggctgcttccggcgctggcgccggtactggcggactcccctatccgtctcaatttacaggtggaagatgaaacgcgcacgcaagaacgtctgcggcgcggcgaggtggtgggcgcggtgagtattcagcatcaggcgctacccagttgcctggtggacaaactgggcgcactcgactatctgtttgtcgcgtcaaagccgtttgccgagcgctatttccccaatggcgttacccggtcgtcgctgctaaaagcgcccgccgtcgcgttcgaccatctggatgatatgcatcaggcctttttgcaacagaatttcgatctaccgcccggcagcgtgccgtgccatatcgttaattcatccgaagcatttgtacagcttgcgcgtcagggcacgacctgctgcatgatccctcacctgcagattgagaaagagctggaaagcggcgagttgatcaacttaacgcctggtttgctgcagcgccggatgctttactggcaccgctttgccccggaaagccggatgatgcgcaaagtgaccgacgcgctgctggagtacgggcacaaggtgctgcgtcaggattagcctctctatgaatgccggatggcggcgtgaacgtcttatccggcctgcatgacccattattccctcgtcacttctttgaagttcatcacaaaatcattgcgttcaggcggcaaaaaacgacgcgccattggctattttttgctggcgacaaggcgattcaaaacgctcaccgtattagcaaatcttcatttcaatgcgtaatacggagcaaaaaacgagaacaccgggagaaaacgcggcctggaagcgcccaggccgggtgagattactgcgtgctggcggccgttgtcgacgtctgccctgttccaggttcaagctggaataccacatcgacctgatcgtcgaactgaatggtcggctgctcgtaagtttcctgcgcagataccggcgcagcatctgcggctttcatcattcgcaccaccggactcggctgataattagagacatggtaacgaacgctgtaaaccggccccaatttgctgttaaaaccggctgccagcgcttgcgcctgatgaatcgcgtcatcaatggcggctttgcgggccttgtctttataggcgtccggttgcgccacgcccagcgataccgaacgaatctcgttcagacccgccttcagcgcgccgtccagcagagaattaagtttatctaactgacgcagcgtcacctcaacggttcgcaccgcacgataccctttcagaatgcttttaccgttttggtaatcataatccggctgcgtgcgcagattcgccgcgctaatgtcttttttcgcaatctgattttgctcaaggaaggaaagatattgcgccacgcgctcatcggcctgcttcttcgccgtcgccgcgtccttcgccgcgacgttcacttcaatcgctaaggtggcgatatcaggcacagcatcgacgcttgccgtaccggaagtcacgatgtgcgggccttccggcaattcgcttgcctgcgccgacattgcacttaaacccactaatgccgccagggccatcactttgaacttcacagtctctcctccatattgcagtcattgccctgatatacagggcgcatgcaggcaagcttagcggatatcggcctgttgtccatcagacaacgcttagttgaaaagcgcgtgcatatgcgcgacgccttcccgcgccagttggaaggcgataagccacatcaccaccccaaccagaatgttgataatgcgttgagctttcgccgtacgcag
